United States Patent Application Publication US 2019/0183130 A1 - sequence listing, part 11

SEQ ID NO: 2 - DNA, 21303856 bp, Cryptococcus oierenis (residues 1-1,936,715 of 21,303,856)
acccccccacccaacgatccacgtttcgcgttatcggtcagacgtctgatcatccgctttcttgcccctcgctcttgccttttgccacttgtcagggatgaagaaggtgagaatcctttgcttgctattgtatgctgttctacacggaggactagaagaactgacttgctctctccaacctactcgctcgctcgctcgctcgtcctgccgctcacagtcgccgccctcgtcatcgacaatggttccggtatgtgcaaggccggtttcgccggtgacgatgctcccagggccgtcttcccgtgagtgatcgtcgtgtcgagtcgtgcgttgaggtgaggtggaagttgacgaggtcgatgttcccggtcacccttcttccctgctctccccactgccgtcccgtacgattttcccgcttatcctgcgccagctcgatcgtcggtcgaccccgtcaccaaggtgtcatggttggcatgggtcaaaaggactcttatgtcggtgacgaggcccagtcgaagcgaggaattttgaccttgaagtaccccatcgagcacggtatcgtcaccaactgggacgacatggaaaagatctggcaccacactttctacaacgagctccgtgtcgcccccgaggagcaccccgtcctcttgaccgaggctcccctcaaccccaagcagaaccgtgaaaagatgacccagatcatgttcgagaccttcaacgcccccgcgttctacgtctcgatccaggccgtcctctcgttgtacgcttcgggaaggaccactggtattgtcctcgactcgggtgacggtgtcacccacaccgtgcccatctacgagggtttctcgttgccccacgccatcttgcgtttggacttggccggtcgagacttgaccgagtacctcatcaagtgtttgatggagcgaggatacccctttaccaccacggccgagaaggaaatcgtccgagacatcaaggagaagctctgttacgtcgccctcgactttgagcaggagatgcagactgccgctcagtccagtcagctcgaaaagtcgtacgagttgcccgacggtcaggtcatcaccatcggttccgagcggtgagtctcgcgcgtgctaaggtcgatcgggtcgggttttggctgacaacgacgtgtgtctcgcgcgcgcccgcccgtgccagattccgagctcccgaggccttgttccagcccagcttcctcggtctcgaagccgccggtatccacgagactacctacaactcgatcatgaagtgcgacttggacatcaggaaggacttgtacggaaacatcgtcatgtccggaggtaccaccatgtacaacggtatcggcaagtatcagctgcggagcaatgaatgatcacggaggatcagccgagctgacctcgaacctggttgtttttccaactctttcgtgtgcactctccagccgaccgtatgcaaaaggagatcaccaccttggctccttcctcgatgaaggtcaagattgtcgctccccccgagcgaaagtactcggtctggatcggaggagtgagtcgggacagggccaccactttgcttgtcacgccatacgtttactgaccttgccactcggcgcccccgcaccagtccatcttggcctcgctgtcgaccttccagcagatgtggatcgccaagagcgagtacgacgaagccggtcctaccattgtccacaggaagtgtttctagacgattcgtgtcctccgagtcgacgtcgtcgtcatccatcgtccgtcggcgtcgactcgctttcccgtctcgtttcgtctctgcctcggattactcaagttgtttcacacgtctctcttaaaccccctttttcttacgcgctgtcggaccggggtcttgtaaatgccattcgggatgacatcatattcaaattacaaagaggtcgagcgggcgttgatgaatgtggttgccgtgccagatctgagcagggtctcggaaccttgacgcgacggggttcgacaaagtaaccagacgaggaccgcgacgattcgatcagccggtctggtttgtatagccataacgaatcgctcatgcccggtcatgcacttggatgatttccgaggaagcgtgtgcatggatggacgacagtacaaacgtggatctgcagcggtgcgcgaacgcagtgtatcgataggtctgattttgcgacgttcgacctgttctacagcatcaaccaacctccactgctcaccactcgcaacatgaccgtctcaaactctgatacccaccctctcgtcatcatcggtgagtgggagcgctctcgacgactctatcgcatcgcacagggaataccgtctgtgcggattgacccgggatgcttccaaaccgatcgttgtcaagatacaaggacgcggggtgggtatggtatcggttgatctgcagccgggtgcgatacggtacaggcggtcactgaattctaggagcaggtcgaaaagcacggggtaggtcgttacaattttctatcgtcgctcccggggtcccatggactgacggcctctatgcaggcagaatctctagggcgaaatcatgatcgacgctgccctcgccaccggggttgaactgttcatcttgtccaccttgcccagtccatcgaggtagagctggggcaagtacaatgagatgcatcgccgcaagagcgggaatcggactgacccataactaccgcaacgcagtcgaggccgagaccgatgtggccacctaggataggctcaaggacgacgagcttggcggattcacgtccagaacggtcgaggtcgagtttcacaataccaacctgatgctcatgggtatcgtcggaaagaacgttctgggcgaatagagttttgccggccacgcagcccccgatcgatcacgtcaaggccgtgcccacgatctacaccccccccaccccccccgcgagtatgttttttgagtgcgagccttcatcgagagggatcaagggagacggacgttcggcccgtattgccctgtgttcaagaggtggagatggacgaggtcatccgcgagttggaggagggtcactcctgaatgtgacgggtcgttctcaacaggcaggaaccctaacctaagctcatcgatatgaagccaccgggaacacgatcatgcgcgagatagtctctgaccaagagcaagccaagacttacgacggttcactgcagcggttcaagtgatgcgccgtagcaaatcaaacgggttaaagacgatgtctgcttgcaatttttatgtatgggctgaaagtagcacgccagatctacattgtcggccaaacagttgtaagctcacgagtcgtatcagcaatcagacgaccggcaggctcgatctcgcccgtcttttcctttctagctcggcatcgcgttttcggcatcggtcatccattcgagcaatcttgatcggtggatttgtctgaatcagtcagcatgatgggtttcccagtgtgagcccttgcgtctaacagatgagctcagtgtcgcaggtcacctggagcgcggtgactcgatcgaacttgacgtttcttcacaagcaaagtacatacattctacgtcgacgcgagacctttcgttacagcttcaaagcgctcgggtggacgactgctattcatcatttcgacagacctttcaagtaaacggtctaaactcctcgagaattctctgaagatgttagtctatcgtcgtacgattcgggagaccctgagactgttttggctagccatgcgtatgagcatattggtgtcatgctcgaaacaagacgttcacaatttggaatgggcgctagcggggatgaaacgtagcaagcatccctgaccgcgtctagtgttcaggccatgagcgatacttcgagggctgtttacccgtcatcgaatctgcttcatcacgttcacaccggttcatttcggactgtgacagagatcgacccgcctttcatctcgagtggctgctcgttgttgaataggtgcaagtgaccactcccatgacgactttcggatgtaaattctacttccggtgcccctatcatcaactgtcactttgtcaataatcggtgactttggggagaaacgcaacctttgtgttcaagagattcgtgcattgtcctgatcatggatcgtacatgcatacattgatacatacacctcgaaagtctctcgcctatacccactgtagttctggtataccactgcgtcaaactggcgatcccggcctcattcgagaaacggcataccgggggggaaccacgcaagtggaggcgccctttatcccacattcgatacctctattgacatcgggatgtctttctcgacactggatgaagacgtcggggttccttctcctcggccatcagatgaaatcaatgaaaatgggctggatgctcatacgcaacccgtcgaagaccacgatatcgaccgccgacacagtccgcaccgtgcttacgtagacccctaccgaaaccatcaagacccgcccgaacgctacccgctcccctattcgcccatcagtcgcagctggacatactaccctgctctactcctcgtctttctcctgggcggatctatccctgcgagcgtgtgagtcgagtctaccaggtctagctgggcgagaacccgagagctggaggctaactcgatatactccttcgtcgggggatctcagattgggtgtggggtggtgcatcgcgacctggtccttgccctccgaactactcggtcgggttcttctcctctacgctgtgctcgaggtcagtctttgctttgccatgtacggtctcactgcgctcttcgtttctcagacaactgaatcgacccttttatacccgcccctcctgctcctactgcgtaccagaccggcttggccttgctacaagcataccgcacgcacctcatccagccccccagtcctccgtccgacttgagccccgaggagtgcttggggatcttgaccaggatcttgcaatccggcacaggcttgtctggaggcgcattcgacggggaatcggaggatgatgtcggagtgattgggtcgtccagctcaacctcggcgtcgaacacgaatgggatgtcgaggttgatcaaactcaagccgagggatggtaatgtcacgccggatcctatccctacgcacctccgtcgatctcatcacacgaccaacacggcagacggaagaccaagcaggagcgaggctacaggtggatacacggcttcgcctttgatcccactcgagacgctgagcaaggacgatccgagggcgatcgagttcagggagaggttacgcaattggtaagtgtgcggacatgggcctgtcagtctcgacgagccgggcgtgcaaagaattcgactgattcgacaccccaacttcgacccccgtcttaggttcggccgggtacccttttctcagatcacactcctcgacgctcagacctggttgagctggtcatgctgtggtctctcgtatgagcaagtgcgagccgacccggaaaagtcgagattgatagatacgggcgttcagcttctccaagcgaggaccggatggaagttcccgcaagggatcgggaagacaggaggtgtcggtacatccagcaaggagaaagatgcaaacgtccgcttgatgaggcttacgatggaccccgtgagggtctggccgaggccgttgtggtggtacgccgccttgtgggctggggatgtattggccatgaggtacatctatcgcaggtttgggctgaggcaggtgagtgtcggggttcggtttgatggcttcccgggcaaagggattgatgggatagtcgaatcggtagtacaagcaaggtcaaaccgagtgagttgcaaaacagcaggtatcagatattgacgggcgggactcgagctgacgacgctcggctttctcgtagctacctattgaggataccgaaaggctggaatccggaacaccaattggccaagtccgatcccatcatctttatccacggactcggattcggcctgctgtcggtgagtcttccggtgccaatcctcttcttcgcacaagtcgtcgaggctgagggaacccgaacgttgcagccagagaacatgctcgtcatccgaaaactatgcaagacattgtcgtcccatccgattctcatcccactccagcctcaaattagtcaacaattttgggatccacgtcatctccagccgacaccgaggaaacagttcgtgggcgatctccttgaggcgtgcaagcgatggaacttttacaacgaacgtgggatcgtcactcccatgcggcagtttttcgacggtgatatcaattcggacgcatctgaaagactggaccacctcgacggaacgcgaaagaacggtggagtcgtcctgctcagtcattcgaacgggagcgtggcgcatacgtggatgttgaaagacgtgcctggattgacgaaacggaacgcactggtcgatcctgtcgtgttctgttcttgggagggtggtaagctttgctcagcgcacagcaaccgatatgcaatttcacgtgggctgatttccttcgcttttctttgcaagatctgtgttacaatttctgctatagaccagccagatctgtgagcgagatttccgtcagacgcacgggcagcacagtctgatgagatgtacgatgttctgcagggccttgagtgtctcttgaaatacctcattgctgccgagctgggtatcgccaactcgatccagcgtgtaagtaatcgagtccgccgccctgaacgaagacacctcagctgaatcgtcgtttgatgcagcactttgactggtcggccaatacattgtttacggaagagattccggatgctagagaccctgagaagacgctgatcgtgctgggtggcacggacattatcgttgacgccaaggttagccgatgaaagacgcctgacctacgtttgctgaccagcttcctggctgactgacgcagcgagtaagagcttatttaaaacggcgtaagcatgggcgttgtgacgttccccttcaccaacactgacatccgaaagtgccaccgcagacggcctccatctcacgatgcagtatgacccaaccaagggccatacggatggacttcggggaacgagcttggatcggctgatcatttggttggcgacggggaaatcggtcgacgtgcccagcgcctcagccttacagtagtcatggaaattccttgcgacagcaatagatggacagatgtgtagacgaatcgcttgtgagagacgcaaacaattagagctcgtcaaactgtatttctatagttacatgatcgatatcttggccatcgttctgctttgtttgggcgaggcttttcaatgtggagggtcaaagtgccacgtccttgtgctaaccgaagttgtcgtccttgtacctgagttgggtgtaaagtgaggatagttatcaagaaacggaacgcctcttttctcgctctgcaggggtgccttaggaccgaatatagacctggtaaccacctgtgatactcacgtatcactgatgctaagctaaacctaaacccgtgtgatacttacgtaccgctaaacataaaaatctttccaaaccaaaccgttccaaatcaaaccaaaccaacaggccaagagatctcgcaagggtttctgacccactatagccctcagacacatcctcatttccacgtaaacggtgctagggagaagctgttaaaaatgcgatagtgataaagatgaactaaatgttatcatacgttccaccaccgagattagtaggctcatcacagcctccggcatgaagacgtttgccatgaataccatatggtttgagttacagagccatcctcgagagacttgggaagagcaatcaaacgcactccagcaggtgaggatcgctcttccacttggattcacacttgccgggtattgcgacactgctccagcatcgggtgatgaaacggagtgacctcagcgccggctgcaatgatcgcagacgaccgaagccattacaattggctcgtcctctttctcggtcaactgatttaggactgttggaaggagaagctcctcccaaaaggccaaagccttgctctgtagcagtttcgaagaaacccgctaactgatttgccaacgccctcttatgagtagttgccatatcagctcacggcagaacatttgtttcttacgaccgcttgtcatgtccggtcaggtggcgcgtggtcgtgacgcaacttggccgagttttttgccctcctttagccgagatatgagatatgaacgttcctcctaagcctacaaatgatagccaatggattcgcttgtgattaacgacaaggagtcgtttgtagccccggaattgacggcggagctaagggtacctgctacgcggagcaaggcctgtacgattgtgcaaaatacatttgacaaaccatatccaattctctcgacccacacgagagcgaaatgacttcagtgcgtgaatggcacaggtcattctaatttaccaacgacctcaagtggaagatgtaggaatttccggcgttccggtgtcatatcgtggcttgactacgcgccgcgacccagaagacggccaccgccaccgcaaaacaaaaagttatggagaaatggcgaatcgaacgccagacctttccaagataagctaggtatgctaatggaatgttataccaactaaaccatatccccattgatgttggcatgattttacaataaattgaatcctaccactaatattcgtcacatcatgtttagcatcgacccgtgctcgttcctccttcatgtagctcgctctgcgtcctagatttcggcaggtgttacacattcatgtattcgaaatctatcaagccttgacgcctcgccaaaaggtacaaataccattcgtgtaatccgtccacgcgcctccctttccttccttgagctctcccgtctggaatcccgcttcctggacgctgcgaacagaaatcaaccacgtaccctttgtcagtcaagtgcatcgaatactaaacgagtggacgacgagccacgactcacagtcgagcgaattcgacctgcgtggggaaccgttcgatggactcgatgaggtattggtagctatcccgatcgccggcgagcaattgacccatcaagggaataaagttgaacgaatactgcttgtacaccctacgaaccgaggccgagcggacgatcagcgctatcttcacaatgtcaaagacctccccctggaaaccaccgtgactcactctttgaagagcgggttctggaccttgccgaactctaggactcccaacctgccgccaggcttgagcacccggtgagcttccttcaagacggcctcgatcgaattgcagtttcggatcccaaaggcgatggtatagatgtcgatcgagttgtcctgaatgtgagtcgggagagactgagcgttcccatgggtgaacgagatctgaggagctgtgggaggagagggtgagctgcaaaaacagagcgaccgtgaacgccaagcgacgtactgttatagtagacggtcttggccactcgcttttgaccttcgtgcaacattccctcgttcagatcgacgatctccacctcgacatccctgttcccgtacttttccctggccttgtccaggatcttgagcgcgatatccccggtccctcccgccacatccagacacttgagcgtaggggtccaattctcccaccccgatccagactggttcatatgaacggatggggacaagcggggtaccatggcgttgacgaaagattccttccataatcgatggattccgagcgacatcgaatcgttcatcaggtcatacttgggggagaccgaggtgaaaacgtgcccgacgagcgattccttcaatgactggggcacggtcttgaaaccgaaatgcgtcgtaggtccatcggtgggcgtggctccaggagctgaaggtggtggcgtcgacgaagagagcggggtgtaagggttgggtttcgacgacgtagagttgcaccgggagcaagcgggggcgaggctcgtgctagctctcgatcgggaggctactcgcccaaaagcggttcgggtggatgatacggcggacatgatgaaagcagccttcgtcaggtgtgaagttgattgatcttgccggtgtggaggcgataattggggctgatcgtttacatcgacatgtcgaaatgctatacggctactgaccttcggtcgatcgttccgacttttgctttagctcgaaatgaaaacgcataaaaaggaacgtctccttatgcgttttcgacgatcgatcgccgtttcacccggtcagaccgctagtcaccgagttgaacgactgactgactttctacggagcatcgaaccagttccagcgggaagaagtagacagtgccgggtttctaaaagaattttaatgaacggtcctcatgtggcgtatcttgtgattatgacgacaacgagtttctgttcaatgcaggttcgagccggatagtaattaatttcgtttcttcgcaaaacgatttgaagcatatcagtggcattcttaatcaacctctaggtaaatctcgcgagtccccttccgcatgaacgctatcagttgtagtcacattcctcaacggttgaattgccttggaacactcgactttgaaatatcgtaatgtcatttctctcgaaacgagatatgatcacgtgactcgactgccgagatcgagcgatcgcctcccgatagttcgtcgagcgaatgaggtcgaggtcatatcgacgaccaccctcgatcgatcatatatagcctgtctcttctcgatcgtcactcgatcgtctgtgacgtagcaatctacctgaacgaaaagcaatgatgcccgccactaccatctcggccgcagcgcgactcggacgatcgtccaaccacctccgacaggctcagcgcgggttggccactctgcacaagagcagcaagtatgagactggcagtgacaaggcgtgagttacggagtgccccatctcttccagatgaagctagtactgatttgtgcgcgatgtttctatcgacagtcctaccggtaagctgcataacacggcgtcacaagctgatgttccgaaactctagctaaagacgattcgaccttgttcgcagccgttgtcatgatgaacatgggaggacctgccaccgcaagtgtcacaatgatcgaacagcaaatacggcacaaagaactgacgtaacccttaccgacagattcccgaagtccacagcttcctgtcccgactctttcacgaccacgacctgatcccccttcctttccaatcctatctcgcccctacgatcgcccgtcgaaggacccccaaaatcgaagcccagtacaccgccatcggtggaggttctcctatcctccgatggacccgtactcagggtgccgagatgtgtaaactcttggatgagctcaaccccgagtccgccccgcacaagccgtacgtcatgttccggtacgccgaacctctgaccgagacgtgtctcgaggagatgagacgggacggagtcaagcgtgccatcgcgttcagtcaataccctcaatactcgtgctcgacgacggggagcagcttgaacgagttgatgcgggtcgccacgatcaagggcaagactcccagcgagggggacagcgaggacaaattgatcaagggtggactaggttggggcgggaacggagaggtcgagtggagtgttctcgatcgatggcccactcatcccgggttggtagaggccgttgctaccaacgtcaagagcgcgttggagcagttccccgtggaagaccgaaaggacgccgtcatcctcttctccgcccactctctgcctctttcggtcgtcaagtgagtgatccaggctagcaaccattggactctagctagcagcagctgacatcgtccttgtccacctcgcagccggggtgacccctacatctccgaagtcgccgccactgtacacgccgtcatgacccagctcgggttcaccaacccttaccgactgacgtggcaatctcaggtcggaccttctgcctggcaaggacctcagacctcggactcgatcaagggtttggccaagctcggcaagaagaacgtcttgttggtgcctatcgctttcaccagcgaccacatcgagactctgtacgagctcgacatcgaggtcaaggaagaggccgacgaggtgagtcgctgcaggtcaggtttgatctgcgcaatcatccaagctgaacaccacttcaactcgcgcttggtagctcggtatgaacttgaagcgtgccgaatccctgaacgactcgccaatctttgtccgagctctcgccgacatggtctcgaaccacttgaaggagcaagccgagggcaaggtcggacctactagcattcagatgggtctgaggtgtcccgggtgcaccaaccctcgatgcgggcaggccaaggagtttttcgccaagggtgggaacgctcaggccatggttccgcagtgagggaaggttgccggtcatagcggatagaaggtcgcgatgtgatagactgtagcaaattggatcataccattcatctttcgattttaccattgcgtcttcttcatcgagttggttgattgacgaatcgcacagtccgacacgtcgctatcgaaacctgatccgaggagtaatgaagggggctcctactcgtctctccgaaaacctccatgcataagcgcttaggctgatcgagcaaatccgtagggaaatctcgatgaagactattgttcgcttaaaggaggtgggggaatctactggatgccgttcacgctccagcccgtttgcttggccaaccgacttccccgatgaaagacgcaagtaacacatgatgatgcttgagcgatacatccatctctcgcttgctacacgacatcgaccgtggttgccttttcatccccaccgacgctgtccttctcatcagcagttgggctcgtttggcggagggaattcatttctcgttcttcggcttccgcgatgtcggagcttagaactgttcttactagcggttaatcggtgcacctctttgcgaatcgcaaaccccagacgactcacgcgatcggacaattgcgtaccagatcgtgtcatagagaatggtaaggaacaagataacagggtatgtcttttcccgcatactaatgaagcctgtgccaaaccaggacagcctgtagacgaacacggatgctcctagcaagatgatcccctcgacgagacgttggtgtacccttaaccgcttagatgccaaggggtcctgtccggttcgggtagttacccaaactagaggccatgcctctgtgcagaggatgctttgaagcaagacgatgacgatgtgggataggaacggttctggcgggatcatattcagggtgtaaaggacgaaggtatagacgaggagcatgcccaggaggccagcctggcgcaggttcatccttgcgacggcctgagaagggggtatcgatgtcagacctgacgcacactgcttgataagcacaggggaggtggttatgatcgaaaagctctcaagcacgtattgctttgatcctgcatgctatcgttgtagttcgatgattataacgcacatatcccaatccgtccacttagtggacctcggttgcgatgatcggttggttgcgcgtcccctcgccaacggaaatcgccgaatcaacaagaggcaagttcaactgccggactgctatttgacccagcgcgttcagagacaagacatctcattgtactttacagcggtaccaagctctggtaggtttggaggaagcacttcagtgtgcagggctgctccaatgacggatctaatctgcctgattgggcgtgatcgccgaagtcgcgcgcgttgatgcggccagctcaatcgtgatctgttatgacattttaacgtcgaccactggcgcacactgatccatctgggacaacgcagaggacggaaaggaagggccagcctctcagagcagcatacatactgccagacgtaagcgagatgcagtcgcttcctttcagagcgtatggattgtatcattacgtacgaaacattagccggatgaccaaattatcggccgatcggtgttctcgaatttaccaaccaactggcccgtattcattccggccgagatgcacggcacccatagacatagccttaccaacagtcgggatggaggacaaatccagcgggactcggggatccggaaatggaagccggtgctgctcttcgtgccatcagtgcctcttacgaatgggtcgaccaactgccaccaatacgactcggagaaagactagatggcatacgataattcgttctcatcttcttcggaaggtcatctgtcacgtgtctgatgtctgaacccttcccgccggcctctcacggaagggacatttcgggtcggaaatagatcgcttcgaggtcgaggaacacagcaactgccgcaaaatagatcccgctaccggtcctctttgagcctctcgttgacaagtgtggttcgagcaacgtatcattcaggcgcctcgatgacgtcaagtttcttgtccacaacgccgaggaaccccaattcaacacggaggcatttagatcacgtataccctggcccctgtcgtttggcaagcgagaaccaggagaccctcagctgagagccggggctgacttcgcttagcacgatttgggaaggcggagacggggtagcccgcgatcatgtgctcatatttctagtctgcgaaactcggcttggccccgacgtctccttgatcgggatgggggggaccttgtcggatgacccgcaggcccccgaattttcgctaagagctagtgtgccccgtggtcgggtgatcagcgacgatatatagtgctcaggggagcataacatctacgagcagcctgtccgcccatagcgatggtgccctcatcgctcgattacgcaaaggctccctagctatcttcaacgaagattcgccaacactagaccttcggtcgttgaaaccaactcgtcgaacacacctacagcttcattttcaaaatgggcggaggaggagcagctggtgccgatgcggctttcggtatccctactcaaggaccttcaggcttccgaggcctcattgccaacaagaaggctttgggcctggccacttttgcatctctaggtggggtcctatacgtaagctcatgcggcaatgggtgaaatcggtcacccgatgcgcgaattttgaccaattcaaatctcaacctctcgcgtggatagggatacaaccagggagtctttgctcaagtgcaggtcatgagagacttccaaaaacgctatcaagacatcctgggtgatcccgacttgagtcaggaagctctagacgctagcgtagacggtgtgatgaagggacttttgacttcgatcctagaactggggtgggtcgacgactggttccaacaagacgcatgctcgtgctaatcgactcgatgtggctcagggctttcgtgggagctctcatggctggtcctatctcggacaagatctctcgtaaaaggtcgatctctctatggtgcattctctttatgctcggcacggctttgcaagtaagtttggctgagattctggatggctatcaatcggagtggcgctgagtcctccacgttcgaccaggtcggtgcgacctacaatgtcgacttcatctgggctggaagatggattgccggtatggctgttggagcgctgtcgatgttggtacccatgtacaatggagagctcgccccacctggtatccgaggttccctcgtcgctctacaacaactggccattaccttcggcattctcatctcatattggattagctacggcacgaatttcatagtatgttccacttcaacggccaaagacgcatttctgaattaaaaaaggatgtaaaagaactcactaacgcgctcttgtatgtatgtttcgttttttaggggggccaagctgcgtggcgtatccctttggcgctccagctcattcctgccatcgtactctgcgtcggtgccttcttcttgccctactctcctcgatggctaatgctgcgtggaagagaggaagaatgtctgttgacattggcaaatttgcgagacgccgaaccggaatcgctactcatccaggcagagtacatggctctgcaggcagaacaactcgtgcaagaggacgagaagcacgagcgatacggacctggcaagagcgaattgtattacgctttcaaggactacgtcaggctcttcaccaccagatctcttcttcatcgattgttcctcggagcttccgcacaagccttgcagcaatggtccggtatcaacgctgtcatttagtcagtaccaagcctttctgcggagaggcgacgagactgagcctttataatctgcgaatagctacgcgcctaccatcttcagatcgattggcctcccggcctcgacatctggcattctggcaaccgggatcgtcggagttgtcaactttgtgttcaccttcccagccgtactctttgttgataactggggacgaaagcccaccctcttcctcggatcgctctccctggctatctgcctggccatcatcgccgcgattgtcgcgcaattcggggacaattgggctgctaaccagactgccggtaacgctgctgtacgcgaaaatccgccctgatttcttgtgaccttagcgctaatttctatacccttctttaattttcaggtcgctttcttgtacatctacatcgcaatctttgcagtcacttggggtgtacgtaccgatgttttttaagcgtttaccaatactgtcgctgaactcctcaatgtgcccttatctgacagcctcttgcatggggtaaacactcgagactctggaatcggaatgctgagcattagctgacgacttcctgccctgcctattccagtcgtttcgaccgaagtcttccctctgtctgttcgagccaagggaatgaggcaagtcgaagtctcccttttttcgttttttgcaggcatggtctaatgtcaatcctgcttgacaccacagtatcagcagcgccgtcaattggttgatggtatgtgcaggtcataatgagggcgcgtaacatgataccctagaatgacgtccacttcccacgctgtacagaactttgtcgttgctacgatcactcctatcgccttgcaaaacattggctacggtacctacctgctcttcatggcattcatgattctcggaactctttgggccttcttcctattgcccgagctcaaaaacaagacgttggaggaggtgagtcgaaaatcagatctgctcgcaatgaaacgtttctgacggtctcacaattgtgaaacgcagatcgacggattcttcagggatcagagcggtgcggaagacgcggctcgtcgtcagaagattgctcgacagatcggcttggacaagctccccgtacaggaagtgaagcatcaggaggacgtttcgcacgtttagcgcagccgttctcatatggtgcatcggaggtttggacttctcagtccaacacagtccgaaaccttgtattcaccatgactagacacgcagaaaaccctatgcaatctacgacaaagagccatatcggagggtccgatcgatgccgtcacgtttcagtctgactagatcactgggttagtatcgttcggcataaccgcatgtccatatatagccggtactctttgcggaccaacaatcgcctgtctagccgacatagcccttagagtttcggcaggggaaaggcccattccccagtgtaccaagtgaaacctcactcattcgaaccctaaatccgtgatcgattttcacgcgcgaaggcaaaaactccgactgcggaacccgttctcatcttcgcagcgcggattcagctgcgtatcatacccgcagtccatacgtccctttgacccctttgccacgaagttgatcctttcgatcagaccgaaacatgagagtggagcaacgagctgcggggaattttcaggcaaagggtaggggctatatagaatacacgtcggccggagttcttctcgattcgagaaagggtcgtccttcaatcatttcccgttcgatcaagaaatacgcaaccgtcagccggaaaatttacgaccaacatggagcctcagcaacaatattaccaaccggtacgtgtggcttctttctgacgatatccaaagaagaggggcagccaagctaatgaaacggcatgtcatacagaacccggcgtatcctcctcctggcggattacctgttcaacctcctcccaagtgagctttcgaggtcgtttcatgctcattcaatattatctcactgcatctcgtatgcctcggtacagcgcttatggcgtgcagcaaagcagtaagacatttatcgctgattctcgcccggccggatggctgaaccctcgtgcctctcacccttacagtgggataccagcctcagaactcctacccaaataacggctaccctcccactggacaatatccagtatgcgaagaggaaaagaaaaaggatgacagtggatgttgtggaccgtgcggatggatttgtgcagggtgcgctgcttgttgttgtctggactgcatcttctaagcggtctccgtcgtagcaaaaagatacgaaaagccggaacaacttgtagacagccgatatgaattccatcagtgttcattatgaaacatgtctcgctcggagttttgcacggtgtcgcgagctcccttgattacgaagacgcaacgtcgacggacgatattgccggctaatcccgccgcaaatcgcataaattcgacgcgtaacacgggatctatgcgttttggacgagaattccgcgcgaccacaaccggatctcgggccggattaactcgcgtgcctcgtgggatgaaacgcagggatagattgatccaccatgacttcggtgacaatcccactttgatggcgccctgtgatcttcccgccccgaacttcgatgaattccgacggcgggaaagtcaaaatatgaagaggattcgttcagctgaccgaagtgacgacaccctgtgctctcgctgccgtgcaccctactgacaagcgcatgtcaacgccattcgggcaagtggatcggacaacgacatacttgatttcttgatggttacttgatctcggtaggttcttccccctcctcctcctgcctttctctccctcttccgccttgaatcacaacaacttcgcctcgtctctcccccaacgacacagcacagcctggccccatcaacagcgcatttccctaataccctcaggcctcgaatcgtatatattcccgtcagactcccccttttcgtcgacctctctcaactctcattcctctctctttctcatcaaaaatcttgcccttcactcttcaccactcttgaaacgaagcctcgcttcaagaacaccaccatctccaccaccaccatcaccacccgcaaaaccaccttcccctttcttgaaatcgaccacctgcccttgaaaatggtcacctccgtccgatcctcctccccatccctgtacgcccctcgttgggaggcaagggtaaagaggaggtccgtgcgtggggcagcctcgttcgaaagggtcgaggtcgcggtcgtggaggaggaggtcgggggggaggaggaggaagaggtcggcgacatcgagatggacgacgtctcgagtgtcgcgtcggagcaagtcccgacctggggggagagggagaggagggcggtagcggtcttcgagatcactgccgacgagcaggagtgagtctagtcttgcccatttcgagtgaccgccgctgatccgcaatgaaccttctgggaggccaacgacggcccggggatggacgaggtcgagagcgaagacgagtcggagggagcgtgagtcgatcccagttcccaaccatcgcatcggcgctgatcccatcgacactgcacggcttgcagcgacatggacgtcgacgacgaggtcgtcatggacgactacctggaccgcgccaggaaatgggccttcgggtacggattcgggtggcgtctcatcatcgatgacgtgagtcgagtctcgcatctgtcaagcctcttgaacctcgaaccgccgctgaccttgaccatcattttcccgatagtgagctcgcttcgaccggtcgaccatgcgtatacttcggttcgcccgccagggtctggaggcgacgacttagactctcgtcttttcgtcgcgaccggtgcaccttcgaccaagtcgatcgtaccggttcagatcagtgaggacccgggggtgataccccgaccgcactggtctgctccatgctcacgagccgagtataaggagagttatggtgatttgcatctcgcaagtcatcatacacccgtggcgatacgaccctcgtcgatcacatgggtggaggcacgcctgtctcactcttcggaccgcaagtcagtcggacggacaaggcgtggttcttcaggctttcggccgatgatcacgaccggcatgaccttcgacctttgtcgatgcatccggtgtcgcttgtcgactcttgtctcggttcggcggtcttgcggtacgtcaccagaagaagggcgtcagggtttcagtcattcgaacaatggtattcgcagcggcttccgctgtggaagtctggcaggggaggccatattttcttgaagattccttttcggcttggagtttggtttcgggtttctctattcacctcttcttttttctcgtctcgtctcgtcttgaaagtgtgtagtagtgtacattagtcttggcttgacataccccagaaaaccatttaaacccctcaaacactgcaaagtcgtccgagatgcacgtccggctctgaaccgttgatcgcgcggttgcggtaacttggggtgaacagttcaattgacgtacgtacgcatgctatgttcccgaccacagagccggtctcttgaatcatggaaggcgatgtctctacgactgacaggcatcctttccgggtacagacaggcggacagcagattgaaggctaggtcgggcccggcgtcacgatgaatcgaacgagcttgtggaaccacaagaccggggaaatgaattagacgagtctgatggaatcagcggcacgcaggaagacagctagcgaggaggacgggacgcagctaatgaccgatcctgtgacttccatcgatccgaacggtctgctagtcaaccttcaccagactcaggatcgcaacgagaagatatttcgtcccacggcagatccagtcgttgtgcgctccgaaaaggccaaaccgagtcacaaaggtgtttcgtcttgatcccggatcttggttctcgctactggtctgcgacctattggtctggcagtaaagccgtccgaatatttgcaggatgcaacgttgaatctgtcctgcattcccggtacttattcccggtgaaattgcaatccacgtacttttccgccagccagtcttatctgctagtatgggctcgatccgtgtgccgcccatcttgcctaccagttaacggagcggtgcttctgtcacccgcgattgtcgattctccaatcgaatccatcaacgaccttcggaataggggtcaaggtgatcattcaggttgtcgggacatcccacagcgccacctctcgctgggcttgcccttggacgtgagcgagaccaggaaaccgctggtggtaaaaaggttgcttcgctgcggtcgccatcatctggaattgggacacgcctgaggtacgaaacgccgcttggccaagtctccagttcgtgtcgtcttttggtcgacgaatcttgcggtcccggtctcgatgtttgcgttggtcatcgcgccgccagtcacgacaggaatccagttgattgattattcacaacacccaacaggtcctacggcccatcctgctctgcatcgtgcgtctgggtataatatgcaatcttcatgtgacgaccaccgtgctggcgttccccatcccgtccgaccatccggcgctgtgctatacaaacctgccccgaatcgacccctcgccattcataggtcccgctaatcctttccccgtattctgtatcccgttctgttcctcgccgtctacgcccgtcgccttttttgatatcgtcgtcgccgtcgaggcggtccgggcgggtttccgtacagggtcctcgaatggcaaactcatcatcgaacgctcggattccgacaagttgaagattgacgaggtgtacgagcggaattgacgtcgaacctgacagcaagaaaaggcaaggggaagattgtccattttttttgagcgaaatcgatgtcgatttgggcaagtcgggattgcacgatggggatcgagttcgagatccgatatcgtatgtaagcaggagagcaggagtgtcaagcggtcagtattctatatcccgctcgcatcgcgccgccggggaaaatcacggcgaccccgctccactcacaggcgagaagacgtgctccttgtccccaaaattggcaaacaagaccatgtacgtgcatgccactgttttcgttcaacgttaatgcaaccgtgggttgatcccggacgagccgatgtgtgcggggagaagttgccgggattcaagcggtttgtagagcgaaggggaggcgccgggattcgaggtcgaacgacaaagcgcaaggtgcgttttgggtcaatttccgtgacattcaccgacgagaaccaagcgggttccgtggtacagaccgaacccgcagtcaaacagcaagacgtggacgaaaccaaagagagaatgggatggatgtacagtagaaacagaaaaacaaggggaggaaaaagcgatgtatcgtataagcacaatgtcgcataaaatatccatcgattgcatacgagtcgcttgtctgcataggtctacaatggggggaagacaacgacaaggggagtaccctaggatcgtccaggtctctctcgagaaagaggcgtcctcgggtctcgccgcttgtcgattgctgacgacgaacccaacgaacaagatcacacgcgccggcttcttcgtgaagagtcgcactgacaacatcgacatcgacactagcactgacccgacactcacctccaccgacgacccaccctccgacgctcaaccatcgatgaaacctgctcggtaccgcgttctcattggcgaccctcctgaagtacttgtcggcctgttcctgcgtacgcggggtcgggagtgtcgttgatgtcgggggcagttccgagggatgggtggctgggcggccggcgcggaggtgtggggtggggaaaggcatccgtagggcgatttggcggcgggaaggggaaggcagaaaagtacgtcgcagctagacttatagtaaacagacaccaaaaggtcagctcaacgtttccgtgcaacgtagttttggcggtgaggaaagcaggaagaggacgtcatgggacccctcagtgtaactatgacaaataaattgtgccatcacggcgccggtgacgacccaccgcccctctctccgctatgatcgtcgattccaccccaaacgctccctcttcgatcctggacgagccaggaccgacgaagaagcaggaagaggacagaatcgactctcattatccctcgcccaagacgggcgaaagaaggcgcggggagagatgcgagggtctagaacgctttttttacgttccccaggctaggtggttgtggaagattatcatctctggggtccctcttcggtattgcgcgccctgcctcgagctgggggatggtacgaggtacttacgaggaggatggaagcgtgataattcgtctggtcgtatggattgttgagaggcgagaggttgcaaggatgaaaaggtagatgtcgattagccatttgctgaaatattttgatggggtagggagacgggttaagcgacctgggtcttatcaattattgacctgcggcgtgtcattttccagccagatagctagtgacgtgtcaaatcaaacacatcgtcttcgcctaaatccgatcccgaccttccattcatcatcgatcgtctgcttactcacaagagagagcggacttgaaagggttacttgcaatcagtccagaccctgcaatcatacagctgcagtctcggccccgatcgcaatctggaacgatgcagtgacctcgtccaccttgtatccactcttgaacagtaccggccagacctccgcccgcagcgatcatgagcactgtaccctcgcgtaccggcagaccaccatcgaacaggaacaagagctcggaacatgctaccaagtccggtagaggggagcgtcagatcactggaagcggcggcggtgcgggtacgaggtcgagctcgatgaccgggacgatggatagatcgggagctggagctggtgctggagcgggagaagcaggagtggaaggaaagacttcggcggagctcgtcaagtcagtgtactctcttgtctttgtcaccctgcatgtcgttctcttatgctctcaggtgggctgatatgatcctcctcatcacacattcgccctgtcccgtctatctcttcctgccggccccaccttggcttcactcgtcgtcgcgggcgtttggggaaagcagggaagccaaatcgcagatcaagcttctcgatcagctcttgcacgtcaaggaaccgtgggacaaggaagtggatatcactaggaatcggtaagtacccgtcgtttgtgacgacttctggttgttcgctggatctgaaaagaagagagactgactgatggttctgttttccatcatacctctctacccctatatctactcgatatccatctcgataccaatcgccccgaaaacgcgctgatgtatgctaacacagtatccgggcatgttacaagatcgtccacttttcatatccgacttcgtccggcgcgcaatcgatcgatcacctatggatctataccacgcacgtcgtcattgcgcgatatcgcgccctgatcgccagtctggacaagcagctccaataccagcaacaacaagatcagccgggtgggaaacgtcacgccgcaggtcaattcgtacatggaagagccgacggttcgatcacgggtcccgtagagatccgaaaggtcttgacccgtttcaagagtttcttgtgctctgaacagacgttttacaggggggtgatcacttcctttgtcgagacgtttgggttgtgtcgattaggacctcggacgggcaatcaacaggatcctcagcatcaccacgagcaccagcagcagcaacaggaagacggattcggttcggccggacccgtcgagatcgacgttcaggcttacctcgaggtcgtcgggattcctgtcacatccagggaagatgacactcacgatcacaccgtctcgtcgtcgtcctgctcttcctctcagaaaatctcgctcaaccacgatgaggctctgaaaaaggtcggactcgtccacaaggcattggtctgtctcggcgacctggaacgttacaaggaacaatacggggtcgagcgggataagcagtttgggcagagcgggaggcagggtcgacgaaagggcggacctggggatgcgcagggtcaaggacgggtcgttgatcccgcggtcgggtcggcagagacgggtgagacgtatctcaaagcaaagagctattacgaggtggctcggggtttgttgcctgacaatggtcagtcccagacatccttttgatagcacgcagccgaggcgtcgagctgattttgttctcgtcgaaacgaattcgcaccttgcaggcaacccttcgaaccagatggcagtgattgccacgtacgctcgggacatgttcacctcagtataccactactaccgcgcgctcgcctgtcaacagccgttcctcacggcccgacaaaatttggacaagatgctgcgaaagtgtctggacgaatggcgaacgagccggtcgtcaaccagcggaaattcgcctgaactaggattccccgagttggatccgagcaacccgttgcactcgttgagatcggaagaggtcatcctccaggccatcctgatcaccggcgactctacaccggctttcgaaaacctcgttgctgatcatgccgctcaccttggtaggctattggcggaccgagcggtcccggccgaagtcattgtcaagacgatcgtcatggcaatcacgtgtcactgggacatccgtctgcgagaagcgcccgaatcggacgaccaagactcggaccacgagggtgccgcgttatggtacctgttcaatatcgccggtgtcatgctcgatgttgccgatcaagaagtcaaggatggtctcggtcccgatcgcctcgcaggcatgaacgacgagaccgtggtggacgaggtcatgtcaggcgaggacgactcgctgaccgccttgtacccgtacatcaccgcggtccttcggcggctcttgccggccctgcggatcttttccaaatggctcaaagccaacgcctcgttgttgagcgaaaactcgatcgcgcagcaggaagagttttggacgacgtacgcctcgttctgtcgacacctcgaggccttgttccccctcgcccaactccccgagctgtcagacgcgctcgaggaagactttgatatgcgcgggttctcaccgctgaagcgcggcatgatggagccccgtcgcggcaccgaatcgaacgaacaaggcttgcgggattcgggggtcgggcacactgtcagcgatgtccatccgaacgaggaacaattgatgcggatctcagacttgctctgtgacggcaagttgatcgcgaattacgcagtgagttcaggtttggcgatcctcaatgcaaagtcggccgggctgatcacgccgttcctggttccattgcagcccgagtctttcaggcacatggtccagccaatgtcattcgctagccgtgtaggtttgatggatcccgccagcgagaatcagctcggggacgatcgtcggcctaccttgtcgctcgctacagccaacgagtactacggacacaatgttcaacagcctcctggcgtcctctcgcgagagaattccgagttcggcgacgctgtgtcgatcagcacggcgaccgaggatgaccccgtcaacttggctatgcgggcgaccttggcggatgggtccagcatggctgacgatgatgaacggcttgctctccccgaggatgaaaacgatggcgacgaggatgacgacgaggacggagatgacgatgaagagatcatctggccgaaccgtcaaacccggcttagcaaagacgtcaccgctgaaccggctgggctgatcacgccgaccatggccatgcagtcgacctttcaacagacgcatgctgcggcaagcaacaatcaacagacctcgacccgtgcacacgacttgctgcactcgctcatgaccggtagtccggccgtcaggccgtcatcacagaccaacagtcctgtcccaagcaacccggcagcatcgccattttccaacacggcttcgcccttgctgtttggaggtgtgggtttctcgagcggaggttctatctggacgcgtggcgtgaacgagcccaacggcgaggtcgagaggtccagatccggttctgggtttgcgcgagccggatccgtgaccgcggcgcacggcttgcaagggtggtcatcgggacctctcgagggcaatatggtcggaaacggccgatcggatgtgcaaggaccgtctctcattcccgggggtcgacctacagcattctctccgtcgaatggccagagcaatcgaccgtattcacctttcggttgagatttcatcgtgccctattcaagcatcatcaaaccaggcttattcgtgccgtcgaaacgcataaactctattactgtgcatgccgtgtatggtatagtatggatacagtcgagaaaaacacctgagcgaaaacctggcgtatcctggaaacatcgctgcgaagtcgtgaaagtagcgcctgtggaactggcggcgagagagcgtatcgtcgtcataatctgcggtcgtgaagaaggaatcggaatcaagatccagccagaggccatttaagccgcaacccatcgagccctattgggattgccgtcgcatcagctcaacgtcaaacttgattgtaaagtcggcgtaactcacatcgcatgtatagcatgtcgttgattgggtttcgctcccggggagccggggtagatgcatcgcgattgttgggaatatccttgtgctgcacttgatccgtcgagaacgtctgtctcacgtctgaagccggcttgattgttccgagtcgttgagtgagctcagcccggacttcttggtcactgcgagaacgttatgcttgagctgtcaagtcggacgatttgtagcgcgcgcccgtccacttactccctaaggccggacatgatgtcgatcatcatctgattggctagctcgggattgtctcgactgaggatttggaagccctgttggatcgcatgaagagcttgcaaatcgactgccgacttggcttgcgaaacggtctgtagaatacacggcgcaacggagcgtaatcagccgccgcaagtcgagctcggtgaatcgcaaacctgacgcaccttggttatcaccggcagaacgacttcgcggatcaggatctctccgactgtattcccggtactctcagccatttgtctcggcggtggtgcagcagatgtctgcttgagaaccggtttgatagtcctgccagagcttttggcttagcaaatgccgatcgaggtatatggactcggctaaactcactgctgctcgacgttcgacgaagctaccgagaccgagcgggccttaggcgtgtccatcgggggagtcctgatctcggtagaatctgcctgcgaagcgcttcccgatgatttgagggagggagcggcctcgaagccctatcaaacaaagcgtccgcgtcaactcggacgccagtatagcacctctgacagccctgaccaacctcttcgaacccgtctggcacgtcatcgttgactatgaaagtgcgccttcgagcggcatcatcttccgggtaggcgtccgataaggaaggctgcatttgataaggctggacatctcgctcgaagactctggcctccgagcctttcccaggtcggattgtcctggccacagtgagatcttgttcggtcgttcctccttgcgccgacatgaacgttccattgccgaaatcccaaccatcttcatccccatcgatcgtcatattcatggtctgcgcggagatcgaagtctctgatcgcgattgctgcccagtcaatcgtttgtgctctgcaagccggttgaccagcctttgaagcgattgtacgcggccagccttgcggatgaaaggatgctcgagtaattcagccgtatcccatcgctgcggcagaagtgataggttggtcatcagcattacgtcggcgtcgacgtctcgaaaaatgcggctcacgtcggatggctccttgaccaaacatttggcgacgaaatccttgaactcgtcgctgaaatcaccctctagcttcggcggctccatcgatgggataaggaatagcagtttcatcgggtgttgcgagccgtagggcggtttccccgcgacgagctcaatggcggtaattccgagcgaccaaagatcagctttgtggccgtatccaccctgaaggatgacttccggggcctatgaaaagtttggcaaaacgatatgatcagcttgaaagctaccttgtccttatagaatatctctcgaccctaccatgaacagcggagtcccgacaaacgtattcttgatactcttggcgctcctcagttggcccgacaccccgaaatcggccaacttgacctcacccgtgtcggaaaatatgatgttggccgatttgatgtctcgatggatgatcccctggctgtgcaaataagcgaggccgtgcaagatctcccgcagaacgatggcagcctgaggctcgttcagaggtcccggtttgatcttacgagacgggacacggcaatcagctttaccatcccttagcaagcggccatcgaggtgtacgatgcttacgatatcagatccgctacctccagcgagatactccatgatgatccacaaagtccacttccgcccgacaaacgatccaaggtaccgcgtgatgtagggcgagttgcatccagagaggtagacgatctcggactgaatctccgagatttctgtttgctatattcgatcagccaccaattttccctgatgagacgagagagaaacttgccatctgcgttatcctcaaggcctgcggaatgaagttaacaggtcaatcagctgactcctccatctcatggtccgtcgctagcccgactcacaaacatgcttgatagcgacaatctcgttcgtctccttgtccagcctgatcgcgagacgaaaaaacaatccaaacgaatcagccatcattcgttctcccaataaacatgcatctgatggaccacgggcccaactcacgctttccagacggtcccgaaattcccatgcccgagcttctgcatgagctcataccgttcctcaggcccggcggagaagagcggagttcctgcgagcgtcgagcgttcccggggagtggtaatcacatcctcatcatcctcggtcccgtcttcgctgtcgtgatgagcttcacggaaagatgccaaggacgaaggacgatgattttcggggtactcgtcgtatcgtctatcaaagtcatacggatccctgagttgatccgactgagggatctcaggctgtcgagtgatgactcttccaagaggtaccccgcctttgtacccgtttccagccatatgtccgagcttgaaggtcgatcctgattcttcatcagattcatagtccgatcgagacccctccctggccgtctccacggtagaggccaagacctccctttgacgggcttgccagaccggctccgaactgggcgatctatatcccagcttggtattctggttgtttccctcactaaactgtaccggaccggcacgtaaatgtccttgtccaggtgccaggtcggcaggaagacgctgatgcccgtaaaaccccctcactggggctttctccgtacggtcttccagggattcggtagatgaaccggaggagacagatgtggaccgacgatctttgatggtcatattctccatctggtccagtacaggaggagctggagcggagcgggagttgatccgggtcagtcgaggtgagcgtgctggggaaaacgtggtggtcggcggcgacggtcgacgagcgggagtgccgggtggcatggtgatcacggcagcctagttatagtttctactacgttcgattctgactgatgaacagatctgcctgcttgtcacaaaagtcgatgtcgacaagacgacctgatcgagagttgctcccactccgatttccctttgttttgtttgtcgaggtcgggtccaggtttgttgatcttgtcgagggaaaccgatgaaattacccccgttgacctatacctcttcaagttatatagcccgacaggtatgtgagctatggtcctttgcaaaggtacacagccaggtaaagtataggtacgcctgtttctgattatgtttcgagcaacctaggaggacttgggcctggggaggacggacggttgacgggccaaatgatgagcgcggttaaccgaaactttcaggggcgaaagggttgtcgcaattacggatcagttagggccgttataaaggtagattaccgtggtcgtgacttggcgaaggaagtatgagagccgggttatagagtgcaggaaatgatataagccaggacgaaaaccttcctagaattgatccaccttggtcgacccttttaagtaataacagcttcgatcaagagtccgagatcgtcgcacgcagccaaatctccccgactactgcagtacgtcagtccagccaaccacacgccgcatcatcactacgtcactgtatagatactcacagctcgcctgtgccccctcgacacagcatctcctgtagggcaaggagagcgcaaggggtaccgtgccacgttcatcacacgagcaaaagggcgaacaacgccaggcgagtcttgggtgcaggtcgcgcgtgtgatacgatgaatccgccgaagccggccccctgtttcaacacgacgctacgaagaagaatacggggaataagctccgaagcctcagggaaggaggaagtttgtggaggtgggaaggaacgggcgcgtgtaccccttgactcgtctggccaggctcggttccacagccgaacgaaaggctgagcggtttcactctactagcacagcatccccggtctcatgtcgtgcctatgtcattggagtcgagacgattggacaccgggcaacgatgtatatcacagcatagttgacaaaagtagaactaacactaaggggcagggatgtcactcttcatcagatccgtcacgtccattaatggcccttggcggagctcttgtctcatatgttccttcacgcgatccaacctgtggtctacccatctcaaatccacagcggtatcggggccatgttccactagcatcctgacgaagattgaattatgcttatagctctgaaatcatgtgagacccagagctatgcgacgatgtcatccttagcataccgaatctactagaatagtaattggtcgagtggatgcatggcaatctgcgtttcgtatggctcggcgatccaaacagacttgctcagttcttcccactgacgcctcgcttggccaacgaccgaggctttttgctcgtctttcgactcgactttctggttcccgagacaacgtccatcacggcatcggcatcgatttcgtctgcttcatccgggttggtagcagccgaggtgaacttgctgtagaccgagcgagcgagagccacaggccacaagtcagtgtaggatgcggctcggatttgcgatcgaagagacacgtctccaggctgatataaaagatagacgttggtttctttcccatatcaagactttgagaacacggcggcgaccgagctcaccagcaaaacgtccccatccccgttgaccaccaaatcgagtacgggtccaccctgaggaccatcctcgacgtacggaaccctgacctttcgtcgcttctcgctcgtctcggcgacggccggaggggcgggtcggaccttttgcgtctgctgttccttttccgtcttaaatttggccatctccttgcgtccctcacgagatcgagcttgacgacgagtgagcttgggttcggcttcggtagcggtgtcggtggtatcaagctgttccatgacgtcggcaacgacttcggccttttccacaggcaagggagtgctcgtaccgctccctccagccgaaccagaagacaatccggggaaagctagctcccgtgccctcctttcgaaccattcgaccctgccttgatctcgcttctctcgcatgtagagaatgacatagtgaatgaccgaggtcaagaatgtcagaaagacaaggacgtggagcaaggagggacggaagcgggagtagtagtatccggttcctctccaacgaggaattccattcttgaaaaagtgctgccaatataatcgacacaagtgagcatgcatatagtatccgtacggtagtcatgcatactcacgtcgtaacgagccctctcttccgagtttctcaagatgttcgtgatcactccaagacgagcgaatcgagtctggatgtctgggacgtttcggttcttgtcagggctataccgtcaccaaagagtgaatcaatacccgattgtctcgaaaagcctgtgtccttcttactgcaaagccagactcctcttcctataggccttgttgatctggtcgagcgaggcagtcggggtgacattcaagaacgagtagaaggatgtacctttgccctcagccgtctctaaagccgatacgaggtcgaaaatctcgtgatccctatcgtacagccggagatcagtaacgaaggaagagatgtcaataaagtcaagctgatgccgctcactctttcgtccagctatcatcacgtgcaggcggtcagtcggtcagcaaagtgattcggtcattctcaggtgtccatcgttactcacgccagagcgatcccagccagggaaagaagcagcaggacggaaccgaagatcttcatagtatcaaagagctcgtatgatgccttgctatcgagaccaattcttgagtcgcggtctcttgcttcgtacatcgtatatatcaggtagtcgatctctcgtcgctcaacctgggtgacccaggcttcgtgggggtgacacgcgcaggagtgatttcccttgcgagcgacatggttttcatatcgttaaatacatgctacatgattgattattgtgttatacaacgcgagaaatacccaagtggctgcccctgggttctggaaccatgaccgggtcggtttataggttgttgggtggatcaatggcatggctaccgcgaaatcgcacggttcaacttaaccatgtgtgcattctcgaacacggtgtctaattccctgatgacaagaggctttcctaggaacccatggaatccttgctgcaggcagagatctcgagtcgcctgtacgaccagaagaagggtcaggctcgcgaaggttgatgcttctagtcctgcccagtcaactcactgtatctgcgttggctgtcaaggcgacgacttgcggctgtccggccttttcgctggccaagattttgctcatggcggtatgcccatccatcacaggcatctgtggcaacattggtgtgctcggatagtcagcgaactgccggggcaagtcggtcgtcttgccaacttgcctgcagatccatgagaattaggtcgtatctggtattctctgcggcctgcacagcttcaacaccattcgttgccacatcgacgtaaacgtagccgaacttcttcagtacctgtgcagcgagtcctgtcagaccatgtgcctatcacgctatgctcgtgaccactcgccttgaggcccacagctcggttaatgggattgtcgtcgacaaacaggatgtccaatgggtgacgctaaaaacgaaaggtcagtgccattgggttttgtagactcgtgcgttaaattgctcacagaagcggtctccttatcaatgacggcgatcggcttgattcgctttttgatcacggaatgcgacgtacgaatcgtggtcagatccaaaaagtcgtgaatcgcttcagctttgacgggcttagtgatgatcttagcgttaggatcgctcaatctatctagcagagctgccttatccgtcaattcagccaagaaggtgacctgtccgcaagacacgggggttgcaaatcgattagccggagggagccttttcaaagataaagtagacaaggcaaagaccgcctcactttgacgtcggggtgctcatttgatagcctcttcacgaatggaacggcatcgctataggccgagtccagaacaacggcgttgacattggcgaggtagtcagaagcgttgccgggtgacgatatcgtggttctgccgttcatggcctggatgttccgaatgagtttctccgtcgtcattgtgggggggcataatagcaggacatgcgtcgtgttctccctcttgaaggtcgggacggccagttgtttgtcgaagtgcactacgagggagaagaagaacgtgcttcctttaccttccaccgattcgcaccaggcggaacccttcatgatgtgagctaagttatgggtgatggaaaggccgagtccggtgcctccccatttcctttgaatactagcatcaacctgtgagaatgggtgaaatagacgctgcctggattccaccggaatgccgattccagtgtctgaaacactgaaaatgagagtctctccaccgacgggcgacggctccaaggtccacttgaggcggatctgtcctttctcagtgaacctaatggcgtttccgagcaggttcagcaagcattgtttgatacggaaagggtcgcccaataggttgtgaaggggatcggcgtcgacagtattgtccaatagtatttcgagatccttggtatgagccaaattcgccacagagtccagcgcggcttctgcgacctgtcgaaggtcgaagctaacggtctctaattgcatagaaccattctcgagtttgctgagatccagaacatcggtaatgatacgctgcaggtcttcggctgacgaccgaatcccggcgacgttctccttttgagcttcgggcaggtctgaagagttttccatgatggctgtgaggccactgagaaatagagcatagcccagtctgagttcaaaaccaagccttgacacaagcagatcactcaccttatgctatgcaaaggtgtacggagctagcagcaagcgaatattcagccaacagaaatgtgtaacgacagagaatttggaccactcacctcgtgcgttatcgacgatatgaaggtctgccgatgtgttaaagcctgctccaattgtgtcgtacgaagtcgcacactttgttctaaggatgcagtgatgtcgtgcgattcaagaacgattgcagcaaaactgtataaagcaagttgacaattagatatcaataagagatttcccccttacatctctagcgactgacgttgcaagcaattcgacatgagacttgaccgaactggaaaatcggagcagactgccttgtaaacagatcactccggtgaattgattttggatgaacaagggaaccgcaaggatgtgcttcgttgtcgatgggttgaaatagccatcacgaagaatgggcatctgatccgaatcatttgagtcgacggactagagatcgcgaatgatctatgtcaatcacataactggacaggcacgaacccgacggtaatactcactttgcgtgaatgagcgacctgaagcagtacctgcgctggacagctactggcggcatctgacactggcaagtcgtacgtctggatgctggcatgtgatccaccacctctgagatgtaatttgttagtcgaagcgttttgaagcgccaagaatgcgttgtctgcccgagtaatctaggtcgacaggcggcatagacaaaggttcagagccaaggccgcgctatgcaatctgttgaatttagagcttacctgtatcaaaatacccaaaactctctttagcagcattttgctgtccttctcggtagcaaaggccaagcttaggagggagcggtccaagaaggctttagccaccgacgtggtcgaatcggaagttattgcttacaatgatttgagaataccctcgatgttaaggcgctgcgaaagaccaggcgtcgggtcctcgctgataaatacagcatgtttggaatcgctgctggtggacgcaacgtcgctagacgaagtgctgggactggcgggtttagcgatgctcttgctggctttctggctttcgtagggtggcggggcggaggggtccgctgccaaattgaaagcctcaggaaattcgctcattgcttgccggccaagggcgacggccccgcagcgctggaaggcctgattggcatcggtgacgaatccgccccagatgcgtttcgacaagcctgctccattccgcaagcttctggcggcgctgaggcaaagccaacctaggtgatgtttacgttagcataagctccatccagagactgtcaacttggcgttcctaccagtagctaaatggcacgtcgtagacgacaacgtcctgacggcagactccacgtgaaacagggcgtctgaccaagaaatcttcttcgcccgcaacgatttcaaactttggagcgcgaacagaccggagcgcaaaccctggaaatcaacatctatcacgcgcaaaggttagtcagacacattcatctcttgtgcgatctgacagtggactgactcaatgggaacgctgcaaatgcctcgtgagcttctcgcaggacctcctcattctcgaagtcgtattccaggaagcaccagctcattacgagtaggtatttaaagtgcccgataatacctctccacccctcgcgatgctttatagccttgttcgcaagatcgcgaacagacgtggcaggtcctcggaagagtatcgcattcagtagtgcagtggaccagaaagaaacgccgatcagagcaccatgatcgtccatcgcttcggaatccgtccacgacatggcatctccgtcaagtcctgcattggcgaaagcaaaattacggcggagctttgtctctctggaggcgggaattactcacgccaaagatccgccggctcgcgacgtgtatcagccaaattgatcgcgagttgcgtgaaagagctcagaaaagggcgaacgacgggcgcaagatcgttcttgagctgcactagcgaggccagtccacgctcctgtatcagcgggattgaccgccctgacaggactagtgctgatagctcgatctgggggcaaaatttcgtgtcggatcgtacaggtaacaccttcatccagtcgaagtcagtcaccgactcactgcgctaatgtagataaggatatccgtcgcattggctgtaatgcgagatctgaggttagagtcgcaatgcgatcttgcatctcctatgacacccacatagcgctgccgtgttccatgtgccgcgatagttaatcgagctgatggaaccggcgcgaaggtactcaatggctttgtatgggatttcagaggagccctctagaaaggatgattcattagggccgtctgtgcttcggtgaccgagactgatacacttacgccacgatgtatgcttccatggaatgcctagaccaagttcctggtaagggatggcaacttcgtatcgcggttcactcgcgaacaagatagatcggacgccgaaaacgtagcctgtggctgggtgcatcaaagctcttctcgagcgtaggatgtacgccgtcgcaaaatcaaaccaacgttccgcatggcggggcagacgcgtgtatagcgtcgggccgcatccgatcatgaaaatcgccagcgcgatagcttccgcatgaacggggtcattgtcgtcgacctcggcgccaagatcaaccgcttgagtcaggctttctgcactctgaggcgattgctgttgccactcgaggtcggggttagagatgaaccgtgggatatttaggccagattgtagcaagctgaaaacttgatccgcttgctcgaagacaccctgtacgtggaactctatcagatgaaggcggacagtcatggttgcagctgcgattttgtctgctatatctttgccttgatcgaatgccatctcgacctggttaaccgtgaagatccgttggttcagccgacagcgtcatctgtgagcatcggcggagatgctactcaccgctgggaatgccagtgtcgtatctcttagcccagaagcgatcgctgtcatcaaggtacacatcctttgacatcgttcgcggtctttaacccatgtagagggatccaagacgggcagaaccgtgctagcagctttgacatatcgatgcgctgcctcgaatgcggcgcttcggatggatctttgcgctgcatccagcactttgaatacagaagggatcagaaccagcagaacggcagcacgaaagaaaaagaaatgtcagacttactaagctcagaaatctcgcctgcggaccattcttgaggatcgattggcattgcttccgtgagcaaatctgccattatgaaaacgctttcagggccttcgacctccagcttccttgccatttctgccaagaatttggaacggtccttctctgcaatcaatgcgcgcgcagcctcttggtgacggtcgtgcgtgaacgtgacgttgcttccgacaagacggacgatgccatagacaccggccttctcgcacgacgttcggacagcaggaaccggccttgaaagtaaacgggcaaccagcttgaggtcggcgccttgggcggcgggcatgcaggatagaacccgcaaagccgcctgaacatcagaagaaagtcgcgacagggtcctgcgaggagattccatctcaggtcaagataagcagatggtgtgggcagacttgtacttaccagcgtgcgaatttttcgatggaaccgctggtggagtagtaagggagagcctcggtcgcgaccttccaagcttccttcttgaaatcgaagtactgttgggcgaggagcagagtactttcagctctcgacacagaaggtgaaagaggtacgaccggacctaccaagacttcgtctttcaccaagcgagccaatagcagtgtgatgaacagaggattccctttggtggcagtagacaggaaacttgcgaggacactgaagccatcctctggcttgtcgtcgggaagatgaaatacctggacaagtaaagcgtcgatggtttcgagagaaaagggaagggattcaatgcatttgaccgctgtgagaggcgatgtgtcgagagcggagccttcgatgcggtaagtcagaaggccgagggtgtaaggcaatggtttcttctcgaataactcggtccaactgtgtgtgctttctcgttagacgaactttctcaaaggactctcgtttgaagtgtcttacagttcacgttccgtcgattccatccactgccaatcgtctggtggaacaatgtaggctcataattagcgatgctccagcaggtgatcctgatgcaacgcgtaccaataacgatcactaatggacgctgcgccgaagcaaacaggctgaaaagattcctcgcccatattttgaacctctgagaataggtttcccaatcgatcgccgtaatatccttttccgttctctttcctagcaagagatcttgccatgttggggacaacaggtcgagaaacatgctgccgagtccaggcagcgcatccaagatcatcgacttccagacggtagcgttctcgtgaggattgctgaagatggctgaaaggagcatctcgaagacctgaacgattcctgcgagaggccgtacttgatgctgatccatctattcgaaaacgtaggccgtcagctagcgcacctgtcccagctctggaagacgttacttacttttgcccatccgactaaaaggtcgcgccggcctgctgttctttcgccgatcctgtcctgcaaccattcctcgacttgtttgcttttgccagtcccggactctccataaaagcagcaaactttgcaaattccgtctgcttctgcctcctcgtagctttgcctcatgagatcgacctgatcgctccgctcgaggaggttggtcgggggagagaagcgggacagattatcgactcttccaagcgcaaagtgctcccgttctgcatcgtctcggaggatcccgtgtatttcgcgaagatcggccaggagtgagggcattccagtatagcgattgttaggctccaggctcatcgctctctctatcattccagatagcatttcagggcagtctttgaccttgcttcgtaaagactgccttttccgggtggtatgacggtggacatcgcgcagcaagtcgacagtttcatcggtcggcgtcgcgaattcggccacaccctcggtgagcagatcgtatgccccagatccccatgtatagacatcagcagctccccaggcgaaatcgggctccgagaccgtctccggagcgatgtaagcgaggttttctctggcgaatggtgaacgattccaaatcagcgatgaaccggcttcatcaagaaaccactgctactacgactcactgcatagtatgttcgtcgaaaatgtccttctcaaagcctgcatcccgtctgacgatgcccgcagactcgacataggcttgttctattggggtatcgtcgctcacgctgatctcatcatacgctagctctccagcgctgcgtttcttctcgacctgcgccggtgccgaagcgagattgatctcgtagaccctctgtgtgctctttcgagcttgatcataacgactgatcggcttgaggtaggaaagcgtgtgtagtgcgatcttgggtttcgagcccgctcgttgttgaacggcaaacacctctggtctgcagatggcgatacacaacctgcgctcttgtaggtcctgcgagatgcgaggatgcggttcataagcgaaccgctcgagcgagactgtgccgtactaccgggccgccactcacctgtaccagctcggccagttcgaccagcacttccaccgctctaatgtagaaggcatggttacggatcccgctatctccttctggtggtggagaccgattgactggcgtatcggcatcctcggattcaccgaacgggaacccattctcgtcctccttgacgttcatcggtgtcctgccacctgcctggccctctgcatcatcgtcctgatcgccgatcatatccgacgttgaatctcggctcaatccgctagggcgtttgatcgtcttctttgatccagtctctttggccaacgatcgaccatcccggcccaacgattccgcgagcttgaactgaacctctttactaccgaggttgctcaggtcatcttgccggaggggaaagacgtgttgtttccaatatgtgcgaagcgagatcggtgcggtggaggtcgacgcttcgggttgctgatgtgagggatcgaacggggaaagacgtccaggcgagatggtgccgccgttcgagaggtgagaaggtgttggtgtcccgctatcgactgggctgggaccggtagcgggagacgagagcagacttgacgttcccatgttttcggcagtgtattgctcgacttttgtcgaagggatttccgtgatcgtccacaagccagagtattgaagatcatcgagaaaggccaggtgagactgaaggtatgggaaaccagcggtggagaggtcgtgaaatctggtcctatcgctgtggaacgtccgaatggctggagcacaagtatgtcaggttcagcaaacgtcctcggctgtgaacaacgggggttcttcgactgacctgcctggtccggtcctacaaagatttggtagtagacttgcacctcgtcatctgcctcgtcttccacctcttcccgttcctccccgtcaggtcccgcccctggttcaaaaccaccattctcccaggccttcaaccgcttcctattcgtcttggccagtccttgtaacactctgatcttctgacccgcctgcagccacggggaatgccgagtaggttcgagctgttgaacatcgtacagtcctttcgaagcaaagtcgatcttgaattcaaagccgaaagcgtcgtcggacgaatgctgagcggagccgtggtacaaatctggcaagtccatcgaagtacgacggaaaggagttttaggactcttgtgttccgtccttggagtagttgctgctgttagacgagatctacgagctcgttgtaattataaattgtctccgcttaggtcgggatcatgatcgatcgggtcgagcggagatcttatggctattatgagaatgtcggcactcgagctgtcggaataaagtcaacgtctggtagcgttcagatacatgctatacatgtgaatttgactgtggtattgtaagactcaagacgaggtcgcaagtgttgcaagctgtaatcgtcccggtctcctcccggtttgctcgctcagcctctctctgcctgtctctctctctcgcggggatttggtctacgtcgtcgtcatttcatccttcaactctcgatcgcgtgcgttccaggcgacagccacgattccagcgtcaataagagaattgacgccgatatcgacaaccaacaccactcctttgcgaacaatcctcagcattaccttgcgaacgaccctcgacaaaagctaggaaaaggcaggaagtgtgaacctgatcaagtaggtcgatgcatcggggacgaaaaggtgcgatggccgggggcaatactctacaaccgcacggacccaaaccggtttagatgccgtccttacgtctcgaccagctagcctgtcaagaaggatgaataacgtagcacgcagagtgtatatgtttgcatgtccgtatgtctcgtcgtatacttctcttgcgtacacctcgtcgataagatcctgggtttcgttcgtcccttagaatttcgagttcagatgctgtggatccccggcgacttgaccgtccccgcgcgtcgtgtggatttccgctaaggcggggggtatacccgttcgttcgcctgaaggccagtcgtgccggtcgttttcatgtcgctttcatcacgcccgcatcgctgtcacagatattttccggtaagctcggatcgcactaatcatcgatcatcctggattgggggtgagcctcccacggtgtgcggtgtttgcacgaagggaacgaattgtaatggtaggtttgagggggaaccaccgccatggaggaagaggaggtggacgttgttcgttgagcgagagtgacattgcactgagccacaggcagagcagacttcgcgggcgatagctaaagtcgagcaacactctgattggagctgatactggaccggcgtcggaatagtatgcgtcggacatgagcacaatatcctcattacccccgaaatggcccgtctttccagcaccgagtagatacgagacgactacaattattcgatttcctgttgtaggaattgtcgccaggagagttccaagtgtccgggctgcctttacttcgtgcgagctcgggctcgacccatcaaagctgaactccggatatcccaacagtggatccaatatctgatacggttgccttccccatattcctgctcgcgattctcccctggaactcgcgagcgagtctcagctgctaaatttgtcgttaacagggatctctcgtaccgatcttgcacgccacctattccgctcaaagcaatgtcgcatgggcgtcacctggtcatgctgataggccctacaggatgattccctactggtcacctctctaacgtgaccttctatatgtttagtatgcgcgacaccgatatctgcattgagatctcccatggccactcttgtctaccttgcgtcttgtagcttgtagtttgtagccagcgatgacagacctggggcttctgcttatgctctgcttatgcaccgccgcttagggtacacatgattggccacacgatgtcgaaacaaaggagcaagcagacagcctgaccagagcaccagagtaggcaagtaatggtgttcacgagatgtgttgcaatgaccagacgccacgatatttccacacgcggcaagctccagatcaaggcaatcacgagccagccctttccattattgtgcctctagcagacgagcgaaccacacagccgaaaggaagattctccgctccaggtttgccgtatctgttgattcgaggaggtcatgtgctgcggcgtcggtccttgtcggttcgacaactagcaacaacaagggacaaggagaaacatagcttctcgcggctgtgcgcagacgatggcttctgcatgtaactcgaagatctccctctcctagcgctgactcgaatccatcagcatagcccggccgtgataccgtaatggtttgacgactctccttttgcactcgcaggaatcttctatgtcgaggaaccttgtggctgaagtgctgacgaatcggtcttgcgccaggtgatcctcgcgagatctcgggaccggccggatccgcaagtctgcccttccctcctttcggacgaggtgacgcagaggaacagcttttctggttcggtcaacacttttcttccatgtgataccatcgttctttctggggtcctgttgttagggcagtgcctgggtgtcgggtgacgtactagttgctcgggcagaaagggtcatcgctcttgaatatgcttccgaaaatgacgggtgtcgctctggctctcgtttcaaccaaacgtgacgacggccacctttttctgaagcctcgtcgtaattcggaaacctcgaggaagccagtaccaaggctgtgtttcgtcgaacgaatattctaaatccaggcggtcacgagtcgtcacaaggttgtcctcctcgggtgaaaggagggagggaatcgagccgaccaggtgatcaggtgatgataggatcacccgagcgggtgggtcagtggctttcggaagcatattgtttgtgtacaattggaccggttcgtcgaccaaagaaggcatctcaccgtctttcgaaaaggatataaggcgctcgattccgaggtcattgttgacttccagatcactcaaagacccgtcctttttgtcaaggccgcaaatcataatcattgcaacgcacgattatcacacaatgctgtctcaactctctctcatcgcgctcgtatccaccctagcctctgctagcccgctcatcaagcgagccccggccttcaagcttcaccccgccggcgaccagaccctctgtttgggtgtttctaccggcaccacccctgccgatggaaccgcactctacaacatcccttgcaattcggttctaaccgggttcgagatcgctaaaggagacaaccaagtcgtcaggctcaccggaaccaacttctgcttggacgctggaagtagtgggtccagcttaccttgtgtcccatctttagtcggccatcgaatactcaaatacctaatggaattacagacccctctgacggaggtcctgccaagctctggacttgctaccccgtaagtccccctcgcatccgcgacctaccatacacaagccttacctggttgtctctcaccctcggcagggcttgtccaaccaacgttggttttacacagatgacaaccatatcgcgatcacaggcggtaccgtctgtctcgatggagccggaggcggatgcggactcggtggttgtgcccctggcaccaagactgtaggtaacttctcggctttccccgcatttgctcgaaagctaacgctcgctaatggagcagtgtggtagcgctcgtggtcagacttggacttccgaggcggtcggatctacacctccgccccctactacgagccctcctactactaccccgcccacgaccacgacccctatccctcctacgaccactccgaacccgcctaccacccagcccaagctgatccaccccaatggggacaactccaagtgtctcacgctcacctctagagccgccagcgatgggaccctcgtcggtttgtgagtggctatcgacctgatcgaagctgatccggtctggagtacatctgacccgtcctgaacgacgcttggcagcggaccttgtgacgtccagagtacgagatttagcgccaaccagttctgggacattaacaagggggacggcaagatcaagttgtccgggaccaactattgccttgatgctgggagcttccctgctaacgggatcgagttgaaggtttggacttgttacccgaacactcctcaacagcagtggtactacagtgagtgcgaactttgccataatatcgagcttcaacgcttacacgagtttctcggtcacacgttcatccagccgatgacaacgtacgtcccttatccgcatgttcagacaagaagggatcgcagtagtgttgaagaccctttattaatcttgcagcacattgccatcaccggaggcagtgagtccgctcccctcgaaatgctggtgcagacaacctaatggctgacctctccccgctcgcttgtcgcagctcaatgtatggaccttaggagggaagatatgaggaccgctcaaacttggacttgttcgggcacgaaccctcaacaggcgagtcgcacgaaaagagagggctctcccttctacgatcctgtatatcgatgcaggcgagtactgacttgatcggtggcgtacggggggtttcgcgtgcgttttacaggtgttcactaccggacctcctttgttcttccccgtctaagccatcgggcttataaggaagatgtatcccgtctcctcgcgaagaatggcggaaatctggtaaagaggagctcagggtgctttctcggcttgcgaaacggacaatgattgatggacaatgtggactgatacttacggacgatacaaagcaaaaagattgtgcataatccgagagcgagcgtggatgtattgctatgtgcattcgggctggaagcagtcgatgcctaagtaagatatgatcatgatcaaccacaattggcgagtggagtgtaggcgagatggtctgtggtgcgtgagaaggagcggatggcgagaccggaccacgttgacgcgctccgagtcttccccgagctttggctgaattaggatccggcgtttcatcatgcctcgtctcgcgtgggacgatgttgtcagtttttcccgagatcacaaaggattcaaaggaagggaaacggaattcatcaaaggaagggaagggtcacaattttcctgattgggcgataattcactttgaatacgcgatttcaagtgtggtggcgtcctggtctatcgtgattcttccctttgttcaacgcgtcaaaagaggtcgatgaaatggcgacagaagacaaaggtcgtcagtacaacctcgtctcgcgtctcgtcgatatctttgtaacatgccgactccacggtttgttctccataggtccgtctcacgaaactcacaccttgctgcttcttgtttgccggaaacaaagacgtcgtgtacgggggatcgaaaacccaccacatcagaatcatggcgatcgacacgcgtgaccagcaacagggaccccctggaggaggaggagctctacctcgatcttactttgttccctcaaacttgcccagccgacctacggacgacgagtaagcctgcgccttctttttgttcacgagactcctcttccctctgctgatcatcctggtatcctcataaatcctctcttgtactccacttcacccttacgtccaaccgggacgttttttgaggaaattgcagaatcgcggccttggaaaagtactttgggtcgcatatcgccacttcctctgaatctcgacccatctccactgcccgtgcacccgtttatctgcctaccgacctcgcaccttatcttgaccatcacgctcacccgggagattcggaccaggacgaggatcacggtcgacccccacctcggcctcatcatcagagaggacacttctttgatcccaattgggcttcgctcggacctttcgaagttccacctgtctttccctctggaccggacgcgggtcaacctgcacgcgatcatccggatcaggggaagttaccctctttctggccacaacctcaccctgggttcgagcgggatcattctctttctcacctccctctacaacaggtcgacccacccgtaccaccgactcaagatcaacagttactcaatccggatagtgcgaaacactctggaggatttgtattccgccctcagcctcggcacgaacccgaccttgatccttccggtggaagaagaggagaagacggatcacctacttcaccgcgtttgtttacacgtgacgacgtctccctcgctccctcccagagtctcagccaattagccgtcaggcgagccaggcggaacaaggaaaaagtcgagcggaggggtagtacggggggcatcgacgctgccgggtcggtcagatctcgagcacattcgagagggggtgcagagaagaaggctcgccggttgacggggtactacgatcaccaggatccaagtggtgatcacgaacgagcacagagtgagaaccagcaagtgaaacacgatagcaggatgaacgtggacgattgggctcgaagtcagggcaggcagagtcacgctcattctggcccgccgtatgaggatgatggggggtattccccatcccatcgcagacggacgggggggaccaatgtcgacctggctgacgaggacgacgaactcacaagaagatcagagaggagtctcggctactcgccttcccaacacgttggacacgggggcaatgaagcggatagggctacccttcgttcgaaagccgggacagggtggagtcaagtctaccccgaaagtcaactcccaggtcgtcgtcccgaccgacaatcatatgcgcccggtgaatcggccgggggatggagatcacctgccatctccgagggaataccggagagcgaggtggcgagtatgatggaccgaatgacgattggggcgaggagcgggatgaccggtcagacggggttgacggggatggccgggttaccttagtgaatatcactgccgcatggcaaaaagagacagaaagatgtccgcattggatgctgatcatgggacgtgattttgcacagccgtgatatggaacgcatgagacaggcactcgaggatgaacggcgcgagcagcagcgcttggaaagcaaccgaagtgagtcgacgctagacttctcttgtcgatttttccgtcctgaccaccaattaattccagctcgcgactctgatagtagggaaaattctttacaccgttcgaaatcccaactcaagtcacttcaaaataccgtccgagaccttcaagcgcgaatcatcgccgaacaggtcacccgatccgagaccgaacgcgaggctagcgcacgcgctgaagaggtcagggcataccgcgacgaactggccggtgctgtcagagccttgcgacgcgctaaagaagaaagtcgaaagctggatgacgagagaagaaagggattgaggctgttcgaggagacgagggagaggtgagccctgtctctccgcatctctcttgtcgcacgctcattcttccgtttgtgatcaggctggtcaaactgcgcgaagcatacaaagtacaagaggcgagggaagccgggcgcgacgagggccgtctcgaagtgagtccaataagtgttacatgaatcgatcgctggaaactgatcgtgatatgcacataggctttccaagagatcgaacggtggatggtcaatcccccaatcccaatcgaaccgatgggcttcttgcccacgggagttttgcatccaaacgaacgccatcaacatacaccaggagaacaacaagaaactcagtcccgcggcccgcctcaagaaagatcaccagacccgcgaatgcacagtcaacaaaggcctcagtaccagagtttcggcgattccgcagaccgtctcaaccaacaggcgcaacgagttgcttcgcaagccggcactcaatctcgacccagtcccagtcctcgtccgggcacattgcgagagcgttcaccgcgagatccgcctctgatgccgcctcatagcatggctggcgccaacgtggcttcgagctacctggatcatgtcgaacatgaccctcgaatgcagcatatgctacatggagcgccccaaaggacattcaccatgccatcgcaagccccgactggccgtacccgctcgcatgcgcctgatacgcttgcgccgccagattctgcgagcatgatggacaagcctctaccttccccccacggacggtccgatcatcaaagtcaccatcaagtgtctaaccgcgttggtcactcgagacagggcagccatatgcctcgtgacatcctgtcgccacccagacaagaccacaacgcaccctttgacagaagtctttcgcaagccgatcgctatcctcctttcccgactcacaggacagagtcaattctcgaccacgccgttccgatgtggcccatgtcggaaatcaggggtggcgcccaatcgatcgaccctcgagggatgcctctgccagagtacgttcacgatacctgagtacagcgaatcacaccgctgacaagaccgatattctagttctcgtggaacttcggactaccagtctcatgcacaaggtcctgcccgaggacaaggagcgccttcgcacgccacccatcgatccaataagacggccaggtccaggttggcagcggggctgcgaggtgacgacgacccattgtcgatgatcgaggagaccgatgagccatcgatggagcgtatttcagtatgtgatacgccttagcaaacttgaatacttcgacattggctaacgtcgtccttcgcgatgtagccgaatcctcatcgtgtgccattgcctccgtctacggcaggaggtacacactaccatccatctcggtccgtacaatctttcatgagcagcaagtttaagccaaaggttagcatgccattcgataggaccgcagctgttactcaacaatattctatatgcgcatctagccggtaatgccgaatcctctcggaatgtcagctaccgccacgacttcgaacaacaatttgaggggtatgtacgacccagaccgagccgctcggcatactgccacgcttccagatcctaccgatgagtatcgccctgagaattctcatcccatgtccctttctgcagggcaagatcgcgagcccgtctaccagcattaccgagaacccagtgtgggaggttcacgtcccggattacccggcgtttcacgcgctccaacagtgggtgtccccggaaaagcaccttggtaccattgatgtaacccaacaccatgacaaaccaccccaaactatatcctttatgatctcatgttccttacagatccatgtcgtgccgccctcccgtggcagcccagggcgcagtgttgctcgccccccctttgataaaggcaacttgccgtctttacaacctgccgacatacctttgccagagactcgtccaggtaccatgtacgggaccgaggtcgatcatctgcagaaccaccaccgtcaacggcattccgtcaacgcaatcgatttcgctcaaaggcatcctttaccagaatctcgccctacaacgatcgtggaaaggcagtctaatggtactgaagcaaggcctttggccgctacagtcgaggtatgtgtcgcgatcaagtcgctcatcagtaaaacactaacgaatggtcctccgcgttcaggatgcggcggatattgatggtccttcagtaaggcggggtgtaccattgccctcgattttaaaacgtgatccagcccttctggctctaccgcactcgaagggcccatcccgaaggaaaacatccagtgagtctgcctggcattgccatcgctgtaggatatcgcctgataactttgatcgacccgtagcattcgtcacgatcgaatcgataccgcgagaggaaaggtgattcacatgtacaaattggtccagtcacacgccagttgcgagtctagggaataaccacatgtgtattaaattacgcattaactttgaggatgatccgaaatgtatcaggtgttcattccaagatggtcagcttatcaaggctgagattcattgtagtcagcaaagaagctggacggctgtagcgctactatcgcaactcacaaccattccgagtgaaaacgtcccgtgacgatattgaacacggtagcagaaccacgctcttgattgaagctgatggtgcaaggagttgaagagccttcggtctcttcttcagacttggcgaggcggatatcaaccctgaatcggagttgtttctcgtaaataatgccgctagccggatctgtgggggcaggtagaattgtcaggttggaccacgggcaaatttgcttgtatgcaatcacccttaaaagactcgactttacacttcagacaagctccagctgcgtgttcatcagagtccaccgtgacccgaaagccacgtagcatgcgaatacattcgtctgcaacggtacgcaactcgcggtgcgacacgaaggtcttgcgctgattccaggattgcgtcaacggatctgatatgagtccgacacctaactcatgctcaccagtcctttccaattgaaacgtagagccttgaagaaactcgtcttgttttcctgatccatcggagacgcaggaggaggagctatatattcgatacccctgttctgctgtcgaggcgtgttggcgatcgcttgatcgttagtcagtagcgctaaacgcatcatcgcttgagtctcatcaagtttcacaaagcgttgagtaaattttcacttaccgtttttgctactgccgaaatccagcgctctgtcaaaagcacttctgcttcgcttcctcggcgtttcgtcctggctatcgacggattcggcgccgctcatgtagcttcgtcgcctgatgaagctctttttcttcttcatcaccggggccgggtccaggtgacttgtccccgtggtcgcctcatcctccaagacctcgacgtcttcaacagcatccgcaaagaccgtgtctgcagttgacgcgctgacacgacgaagatcgctcgcgaaatcaacgctgtccgccaaaggagtctcaggatcagcatttcgatggtagtccatctcttcacggtactcttcagttgagtccagggtaggactgtagaactgctcaatagggcggtcacgaagcacttcttgctgttgagcctctagcccaatccttcccatgcccgaagaagacggccaatgcggaagaggtgtaccaaactggcgaaaggcggcaacgtggaatgctgcagttcggaggaagctatcgagttccgggttatcatcaggattggcttttaggaaaatgttcagatactgatcatccggaagtccggggctcaacattggaacggggtccacgtcgatctggatgctggtcggacgttgttcaatgaaaaaggcttgtctctgtatttccgggagtatcggtaatcccagcctgtttctagcagggggaactgcgcgccgtgaggtaggagtgggtgaatcaggtaacccaatatcacgaccggtatctgtttcgacattggccaaaggaaagttggtagcgacaggcggagcagaatgtggctgcgttccgtcgaggtattcgatgtacgggtcgttcataccagttgcagtaattccgacttgggcgttgactgacccatgtagagacaaaggccgcgggcccatgataggcactttatgtgaggaggctttagcctgggtgtcggcgagctccccagccactcgtggatcgtccgtggcatgattgcgtttgaagaagggacgcttgggcgacggtgctggacgatgctcctctcgtagcgagtttagcctttgaaccccgttagcagatcccgtgcgagtgcgaggctgctgcgagagagaaccgctatgaccgtggccagtcttttgctgtccgctgaagacgtcgatggtggacgtcatccttctgggttgctctgatagcgtcacgcccttagtttcagggaatatatcgatcaccgcatatgacttactgtttttatcccctaaggcttggcttgatggttcatgataatcttccaagcgcttctttcgatgtttgtcgagcagaaagtagaacactttctcgtagcattgtctgcgatggaatcttcccgctcagctgatagcagtcggtgattgtgagctagcttactcgttaccaagcaaagaatccaatattatttgccttcctttccctttccatagagcgcaaagattgtcaaggatttccgggtcaatgaggtcggcggattcgagcggctgagacagaatttctagcttaggcgggttgacgattgggactgggtattggtcgctagaaggatcatggcggaagaaaaaggggtgagacatgatttcgcgcatctgatcgggatgggagccggaaatatcagcgcaatgacctgttttgacaaaatatagtgacgcacggtaatacgctcgtatgggtcgactacaagcatcctctcgatcaagtcccgcgcgtccatggggatatcgtttggcatattgtaaactcccttgccgaccttgtagagcagcttggtcatgtctttgtcatcgaaagggagagtccccaccagaagggcgtagaggataacgccgcaagaccagatatccgatgcggctccgtgatacgacaatccctgcgggccaaaaagatgctactcagtgctgcgcgtgcttgtgtcattcggttgatgcctaccctaacgatctccgggctcgcatagtgaggactaccacaagaggtttcgagaagctgattgctcccttgccaagccgccattccaaaatccgcgatcttgatgttcttatgcgcggtcaacatgatattttcgggcttgaggtcacgatggcagatggcaaagtggtggcaataatcgagtcctcggatgatctgctgaaagtacttcgacgcttcattggcttcaaatcgtcgagaggaaaccaggaactcgaagagttctcccccttgcacgtattcgagaacgaggtagctgtcatcaagcccgtcttcagtggcgagtcgaactcggtttgataagatccgacagtgactcacatgagaccgtccttctcatgcacgtccagcaaactgatcacgttcgggtgatcgatgagcttcatgatcacgatttccctctccaaagtaagccgctgtctttcttccctctcgtgcatcttgcggcgctgttttgcatcttgctgatcataacgttgggcggacgcgaccataatatggcgcgggacaatcttgacggcggcgtattctccagtgcgcatggactttgcgatcttgacttggcctaataagttggacacaggaggaaagcatagcgacgtgcgtatgtgaggatttgttcacggatcgaggcgacgacagtgatccatagtagtaagatgtcagtaatttgatatcgtgaggtaccggatgataggcctcaccgctcgctcctttgccaacagttcttcctagcctccattctccgatcgatttgacggcccctttctcctcttgaggttcgccctggctctgcacttctttctcataccgagaaggcccatgactatgtttgactctaggaggggagggcgtgttcatgacgagggacatggttacgcggtggcgacttgtcatcagcaacctctatgttaatcaatgaattgatggcggtgggggtggttgtccgaaagagttgtttcactctcgaagacgaggcttctcgtttgagcttttcatgtgtagaaaagcgagtatcgtagtggtcaaggatggtcagcttgatcgctgcagaaaacgctttacccataagagcaccccgccagtgctggcgtgactcacggaatgctgggagaatcgtcgttgcgttggacttgctcccgaattagaagagcgatgagtcaccgtgtgatccgttggaggtagcccaatagacacacaagtagcttaccgaagtgtgccccttgatgtggaccgagatcgttgtggatgaacatttacaatcagattttgatggggatccacgagcctgtggctcagttatgataaagttccggagcagcaattagcgcaatgctaaccggaagctttttcatccgatcgacaaagaccgattggggctgcctgaggcggagccgaacgtcattatgatatacaacatgcggttagggaccttcgggtcgaccgtcatacgagaggtccagaccagctgtacacgggtgatgttatagacctatcgggagcgagtagcaaataacctttacccagatcgaccggatccggtagaagacgatccatgcgggctgtgaagcgttcgatcggtgtgtcgtaaatagttcatatgacaatgaaggggagtgagacgagccgctcgtagttctatgtctcggtcaaagtgctggaggacgactgttttcgagagtttggagtggtccgtttttgaggtcgctgtttatgtcggccgtccgccgcatcctcctgctgatccgagaatctgtccagcttgcgcttgagtttcccttgctgcagttgcgtcccgttctgtgagccaggctgtgacgaaagtgatgtggcggagagttcgtctatggattgaccagtagtaccgccgaccaccaggttcagggcagcaggagtcgggttgctctgaggcgtgagaggcgggtatgtcgacaagggtgtcgtagtgaatgcactcgtgaacatgggcgtcggcgtcaaattgttggttctgatggacagaacaggatgttccgattgcaggccggtggccgcagtcgtatgcggtgtttgcgcgtcttcgagcatggtcgcctcttcctgaccagagctgggcgaatcttcctcgtagattggcattgcagctgtatccatcaaacctacccggccgcgggctaccgattgctgaagagcgactgcgctcgccgcattgacagatgtcagcttaggcttgaggacctgaagcaatgttcagacttaccttttggactgatttgctctcttaagctcaactcgaagagcgggatcatccccaagaacgtgctggcaagctgtaaagttgaaccggcttcagctgaaccatttcacacaagtggcgagtagaagtcactcacatcaaggaacctgagcgatgatgcgctcattccgtattggtccagaggattcgtggggatagcaattcgaaccccgctggactgctgcatctgctgcattgcgtgaccttcggtatagctttcatgcgcgatgagctctccggcctcactgcggccgtgctgcctcgagattgttgtcgacaggtggttcggatcgatgccgtaggattctccgccttcgagcatcttgtgttgctctcctctcctgccgccctgtcgaggcgactgatcggacttacagctatcgatcgatatcggaggcgtcgatagcgggatcatgtctccaagccgctcttcgaccttgacgtgaaattgctcctgtggcgatgccgagatggattcatttccttcgaggtgttccatgcgaacctgtaaatgtgaagcgaacttgggcgtctgctgggtaacctggatggccgagcggaagacgaggtcgtcgttggcctgcaaagcgagctctaatcggtgcattttgagcaagccggtcatcggatctaaagtccagatagcccgacatgctccgtgtgagatgacgacggcgccgttcgccatgtatttggaccacgacaaggaagagctttccagagcgaccccttgcggactaccctcagcgattggggcgggtagctccgggtcttcgacataggtctctcgcggattggcaatgttccaggctgtccgaacggcttcatgtccgcgaaccgtgctgaagaagcggggtaacagatactgtggcatgactatggacaagagtttgcatgaagtcaattggcaaatctgtcagggcgaatacaagcctactcacaaaactccctggactccattcccgtcagtgcgagttctaatactgcctcttcaaggaagtagtcggagaccagcatctggtaggcgggaaaggacgacctctttaatcggcacagtgtaagcgatccctccttgaatagcggtctagggtggacactgacttcggacgccttcttgacccgctcgaagaactgcatcatccgcaacgtcgcttgcccaaagttcatagccggactgacagcaaggcatgtcagcttcaaaatacgcactaccgttgaagggctgcgttgacttactgtacgatcatgccaggctcctcttccacccccatgacgataccttcctcgttttcaagtccaatcgtgataccgctaggcatgaactgcggggtttccatcatgtccacgtattgctgtagctcaagttgatcagttcctgaatgatcacgatcggttaaagcgaatactgtactgaccggcacctggctcgattccctgggtccatgcggccctacagtggtctgcctggcttgtactgttggactctgtgagaccagcctggcagcttgaacagcatactcttgagattcgttaacgaaattcggactggtggatcccgaatccatctcttcgttttgaacagccatgctgatagcgcgtggagggggatagccagcgggactcgtgatgatcccggtttccctcttgacgggcatcccaagtccgagtccagcttggagttgcatttgtgccaatcttaccgcagttccagcttggctattagcctgcgaatgattgctcaaggcggtactggccatctccgagcctggcccacgactgggacctgctggcgtgctcattgctgatccgggaggcatacgttgactagaggcgagcctcatctggaccggagtgtctgtcggaccttgcgtgccgttccgcatttccctctcgcgatcacgcatagccatcgcctcggccgtagagatctgtccggcccttgcctgcccgggctgttcagacggcgtcgagagttgtcttatctgaatctccctgatctgctgagcttggatctctcgcatctgctgaatctgagcctcgttttggaagggaacgggagcactaggcgatccttgtatcacagctggcgtgcgcagagtttggatctgacccgcctgtccctgtgcaggccccgcaggcgactgatggaccacgtacgctccgctcgcagcttgcatctgtatctgctgcctctgctcagcctgttgttgttgctgctcttgctgacgcagttccagctgcatctgttgctgcttctgcctttgctgctgctgttgcgcttgcatcgtacgctcccgctctcgatcctgaatgagctgttgctgctgtaacctcactctcgcttgagcctgggcctgagcctgagcctgagcctgagcctgagcatgcgccatcgcctgagcttgtcgttgcaaatgaagctgcatctgcatctcctcctcggcctgatcctcggcatcagccaattcctgctgtcgagctcgcatctctaggtcgtgttgctgctgttgatgttcttgctgctgctgaacaatcatgttatgccgctgaatctgttgacgttctctgaccgcccgggcggaataagcttgactgtcgatcatgacgatcccatccggatgaccgttcggatcgttccccccgacccccgtggtaggatgttccaatggtccttgactgagagcagaaccgagcacatcccccgcgctcgcaggtggtctgacgactgttccgggaatcaaaccgggcgtagcctgacttcggggcgtgggggcgtacccaggttgtaccggcgtgtgtaactgagtctgggacggcctcgtctggagacccggtcgagctggtggaagtgatgcctgtaccggtgggcgatatccggacataggtgcaccctcggaatatgccggctgaggtacagccagtgggacgacgatcatcctgccctgtgatgtggtttggagcgtcatccccgggggtacggccatctgatgcccatgcatcgtcgccatctgctgagcctgaccagctggattcgaaggcccagctacgggctgatgctctacgtactgcgccgtggtgaagggtacggcgtactcctgtccaggttggccacgctgaacggaagggttcgccgggcgggcgtagccattgaccatgacgacgttgccttggacgacctgatgcgagggttgttgctgttgctgctgctgatactgcacctgcatttgctgctgttgatgctgctgctgctgttgctgttgatgcatcatctgttgttgttgctggtactgcctagcctgagcggcactctggaattgcagctgcggatgcccaggatgtgcaacagcgacaccgggctgcgcataggcgtgggtagcgtaggccatgatgtggggacggtataggtccgaagccgctccaacgtgattatgccaaagcaggtctctggcgtcggaggtcggtgaacaaagttcggggagaacgatgtcggatgagcggtttatgcacaagcgtcgagcgacattgcggtttgacgatcggtgggaattgagtgttgattaccagctaccagtctagatgttgatgatgcggagtgatttgccgctgtatacggacgatatccgtgtgcagcacaggccagaatcgccgtgttgaggtctggcgtactcccgagctgtttgtgagcggcgacgacgaggattgatggacagcccgtttgacctgatgaacgattgatggcagatgcgaatcaagccagcgagaaccggcacagccaagacgatatggaatgtagcatgctatgcctacaacctcaaaatgttaccgaggacaatgtacgacctctgagattagaacctcttcagaagagtcggctgcctgccccccccacccttgctccccaaagctgaccctcctgtctggtctacacaaacgagctctgctctttgcttgggtcgcggtcgcccttcgtgttagctcgttagctcgcgagcgagcgagaatgcgacgcggaatcaaaaaggggagtcgacaaggacaatcaccctttcgccgtggcccctcggccatctcttccccctcccaaccccgctctgcttggacgtccaggtccccgacgaaatgcggacagtgttcctctttggggacaccgcggcggtatggccactacaaactcttgccatggaaaacgacccgttcgatagagtaaccagatgtggagggaaagaggatcgggctacaatcgattctagctctgttagaccctttcaagccagcgagccatcgcctggacatcaattccgttcactctatcgtgatcgggcgtgcatccggaggagggcggggggggggaagaactcggaggaaggggacgtcgcgaaaacttagctcgcgcgcgagtctttcatttcaacatcttccggcaaccgagctgtcctcgcctgccttgacaaacgactcgccgagaatcgatctactccggaactttgtgtgctttcaatcctgggccgcctctccacgagcggtcagatcgagccaatcatgttgatcgttcacgacctatacttgctatacttggcaacgtgccgtgtgggacgtctgtgcgcaaccagggaccctttcgtcgatccgtcgaccttcgcgagtgacaagccctaagattcccaagcccttcaccatccgcgcaacgattgtctctcggtggaagattaaggccggccccgccggtatcgatcgcaagatttacctccgtagccgaaggggactcacaagatccgaaagtcagacgacgcgttacggcagcgcgggatctgccctctcggcattgattgcggtatcacgtgatctaacaagcgctccagtttctcaacttctccgccaggaagggggaacgagcagcatctgagcatacgaattgataacactttgagtctgtacaacacctttgcgacaccaccgctatccatcatcgccgatcttcatagctcgaggataccaagatgagacagctgaagcaccatgagcagcgtttgctgaaaaaggtcgactttctcgacgtaagcacctcagattctcccgcctcgctcatccgtcccgttcgaacctctctgacccaccccgacttccaacttgctcttatcagtggaaacaagatgcctctctccgtgaagtcaaggtcatgaggcgttatcatattcaagatcgagaggactacgtcaagtacaacaaactatgcgggtcgttgcgagggatgattcacaagttgagcttgttacccgcacaagacccgtatcgggccagaaaggagggggaggtcttggacaagttgtacgatatggggatcttgggtgagtcacacagccttcacgtgaacgtgggtgagatacagtcggtcggaagaagactgacgtttcgttgttccattcgtgatctccctcattatttctcatccggatcaacgcctctcctcctcatccttccgcccttttccttaacgccccttctcctctatgcatgcacaacgtctttcgatctgaagacaccggaacaaaaccctcggatgtcgagaacaaggtgaccgtctcggcgttcgcaaggaggaggttggccgtcgtcatggtcaggctgaagatggctgagactgtcgctgatgtgagttgaagatgcgatttcgatgtctggcacgggttccaggtcgcgagctgggatcccgatcagggtagtgttggagagagtgttgatacgggtaggactaccctgccgtaaggcgaaacaaacatcgcggcaggtcctcggtctcgtaccccgagacaggctgttgtcaccgcccaaggtgcccatcgcctgccagctggagtcgttgatcaccgtagcaacgccacgaaatcaatgcaatgacttgaggaacaaggcaaaacgatggtccaggcgaccagcctccatctgctgctaggcacgggctagcaaccctgggtgaaatccctcagtttctctgccatgacccgttctagcacccaaacgatgtacacgaaccacaactgacgcgaacgctcgttgtgctctgtttactcaggctgttcgcacgatcgagcaaggtcacgtcaggatcggtcccacccccatcacagatcccgccatgatggtcacccggaatatggaagattttatcacttgggtcgatggaagcagcaggaagaggacgatcatgaagtacaacgacgaggtgagtggtgatcgatttgatggctcgatgcgggatcacgcagaacgcctgctgaaagatgaaatcgctcctctgctcgtctaccttagctggacgatttcgatcttctatagacggtcaggctggttgccaaatgccttttcctctgtatcatatttttctacgcgcggtacgagtaccgtgtgtcatgttgtacgcagaatcaataataatcaggtcataccgatatcccgttgctcaggtcatgcgcgtccaaatagaagcgcgcgctcgaccccgcttagatcgaaacgagatcgtagaacgtcgatgaaccgactcatcagatcaacctcgctcgtcagattctgatggatttgatcagattgtcgaagagcacctataaacacatgggaccttccgtctttgccgctgataatcctggatggctcgatactttacagccttactcatcggcacgaatcccacccctcgtcccacagaaattatctacgacggaaccgcattccgccttactttccgctttgaataaggtatgtgctcccggttctttacatgtgtgtatcaatcaactgaggatcagtcgccgctgaatttgcacctatttagttattcgcataagtctatccttctccctcacaatccacgatcatggattccttcccgatcgaagggttttcttacagcaagcccattcctcaccgagtagtgaacgtagacaacagaaaggatacgccccctccgacgcaagaggacggtgcttcagagcgacagcatgtcaatacccatgacatctttctcaagcgacacgtcagaccctggaaaggcaccgccgatcagagccaagagcgattggaagtcgacgtgagtaacatcgagaatttgcctgccttcatcactgatcagccgcctttcatatctccggatcataggaaacccttgcaaacttctcgaacccaactatttctcctactcgagatctgttcgccacttcgagtcaagatcatgagcagggttctcgacagcttcacaacaatacattgccttgtgaggaccactctcaaaatgtcactccgcaagcattcgaaaattctaatccccagatcgttaccgctgacccagccggatcgactactcaggagccagataccgctccagtcatgtctgaagatgatactggtcccctcgctcaacctagactcgccgcctaccaaccggttcgcaacttccctctagcaggcatgttcaagggtacaaaaatcgcaaagaaggccgccaccgctcaaaaagctcagacccatcaattgagcggcggagatctgataccagccaaggatgcttagtcagtcattcgtggaaggtcgcgttgaactgacaggccgtactgacgccgtctcgaccttccgtagcccgaagtggcccgattcggtctacgatcagcatcaacaaagcgtcgaagaccagcctggtctgctcaaagacatgtcactccagtgcaatgatgcgccgagaacgtccgagttccaaatcgaccttcagcatcaggtcggttccggaaccccgcaatcgccgcgaaaccgtgttccgaatcagacggaaggcgagagtcattccatctcgcctccttctgatacggtcacaaatgacagcaccgtgcaccgggttgagtgcatcgccgagaaattcactccagtcgacgatgtattcggctcctctccagccccccgtggatacgaaaatctcgagcaatcgtccatccagatcgatcaagttgacaccacgtcctcaaacatcagtcatcatattgaggaattggcccagctcggcattgccagtctgtgtccgctgcaagcagtagcccagtttgactctccagctgatcaagaccaggaattatcgacttcttttgccacacccaaactcgatgtggtcgtaccgcgaggatacaaaactctgtcaaacaacggtgaggcggcgatcgctcattttcagcccagacgctcggtatcgaagacacaaatgccgaaactcgaatcctccaatatcgatgaacctggacatcctattgacgaggcaagcatggaccaggatattctttctgatgacatcgatgatatccaggagccttctatttccgatgagcttgacggcgagctgactgcgccgatagttcatcaaacgtcaaccaaccgcgtgtcgaccccagaagcttctcgatcgggctttgaaactccaagacccagcatctttcgtcaactggcactccggtcaacaatctccagaagcgacacaaccctgaacaaacagcccctcgaagggcagtccccgaacggaggtcgtctagtcgacactccgacccgggcacctagtatcagggctcagcgaagaccagaaatcggtgttctcggttcgagaccgttactgcaaccgaggattggctcccgcgcgcagcagcagaaagaccccctaaccgagggtgatagagatgagtacgttgcaattggtttattgatgaaggccaagaagcgagaggtggctttacaagaggctgtaagtatggcctcgatcagatctacttttcaaagctgacattcctcgattgggcagactcggttgctagaggtagaacgcgcgacaatcattgacctcgaggcagagatgaagttgatgcaaagcacctgcagtatgctcaagcaaagtaatcgggagatggtcgagtctagtgccaaagccagacaagaggatcgcaaacgccgcaaagagctgaagctagagatcaagaagagcaaagagcatgtgcagtcgctcagaacgattgccagcgtatacgaggagagatatactgccgagctcaaacatttgagacaatcctacgaggcaacggcacagcaagcttgtcatcgtgagtagccttcgtctgcgtccggtgatgtagatatccgtctgactttgcgacgaaggtgcccgagccgaagttgaagccgaaattcaagcgagccatgccacggtagtgaagaaattggaggaagaattatctgaaggtagcatcgcccgtagcccgacgacaccatgatacacagccgatcatttgatcgcgccctatattgctttctcgatagctatcacgtgccgaaactccactagcgaggaagcacgcaggtcgactgaagaatgcatcaagctgtacggagagatggaggacgcccgcgggagatcgtatgtatcgatatcgaatcctggatcgccggtcgatactgatcgacggatttgttaagatccgaggataaggcagaaattacccgcttggaaaagcttttgacagaagctattcacgaacgctgcaaggattcaaacaagattgaagccctcgcgagggaaaaatctaccgctaaatccgaatctaatcggctacaggagcgcctacaaaacaaggagcgcgatctggttgaaaacgagacgagaactagtgttcagattgatggcttgcgagcagacaagatacaactgcagaagcgactcgacgttgccgaagaggatctgcaagaagagagactgagatttttcggaaaagagaaggagtactatgcgtgagtcttggccgttcggccgttcattgcgactgggttatatgtctgaaaggctttaaattttaggctcgctgctgaatttgctacgtctatggacaagcttgagaatcacgccgataccatagaagagctgaaagaagacctcaaggtgatgcaacgcgagaaagctatcctcggagaaaagcacgagtctgcacagattcgactgttcgaatcgacgcagaagcttgaagatcagcgaagaactttgacgtcgctacggagtggcctagaaaatgctgccagtgacgctgtcgcactcaaacaatcgttggaagattccaggtcttccgacaaagagaaacaagtaagcatcgctgtcgtacgccctggcagctcttgttaaatgtctcaacatatatagtcccgaatagatgatttggtagcggagcttaagcaagcaaacacacgctatcaacaactcgccacggcgttcgaagccaaagccgaccaatccacgagcaaaatgtccgaattgacgacacaagttggacaactcgctgcagctagatccgcagccgaagacagccagatgcaagaagtgggtctaatcgatgcttccgcgcgccgcgagataccactaaagccgatgaccaaccatagctcttgactgagcgatctaacatggcatccgatattcaagcgcttgaaaaagagaagacggcctaccaaaccaacatgaaaaactacgatacccgccttgccgaatacaagaccctacttgagacactcgatcgagaatcaaaaagacggggcgaggtttgcgacgagcagaaagatcagttgcgagtccttcagcttgcgcagaaagaggaaaccgccaaggccgctcaagcggctgttcgagaacaaggtctgcacaccaaggtagtcgagctacagcaagccgaaaaacagcggttggagcatgaagaggcggcgttgatacgatatcaagcgaacgatctggtgagatacctcgattgggtttatatatatatatatatatagaagctaatgtggaccactggtgagatcagaccccaaaagaattcggcgagtagcagagaacgtggtctgtcaggtgttccattctcgctgatgcattgatcgttccagctctttgctcaagagcgattcaaggtatgttgatcgctattcgggtctgtccctgcttaccaaccctacatgcgtccagacatgaccagagaggcaaacgctcgtgtatgtgcaagaccaatctctcgaaaagtgatacaaatattgaaagagcgagaccacagcttgccaaagaagtcggcaaacgcaacgttgttatcgagaagcagaccgcggatattttccagctcaaaaaggacaagtccatagccgaagcgcagctcaagaccgccaacgcgatattggtcaagcaggcgcgtggaaaacgatcatcaatcgttcatatgcagcacggggctgactactttgcatgacgatcaggccgatcgatcagggcgtaatctcatccccagtgaaggatggggagaatcttccgacagcggacatcacgtgcgtttgataagcttttcggtcactttgacttagcgtctgatgacccgcttgtaactgttacagtctacccaggacaaagagactctcgatcaggatcccaacgcaggcgatgaagacgagcttggagatgacctgatcgagaacagcactgccgggacccagcccgtccgcgcgactcaaatgcctagacctgtccgaaagtcgaacgacggggaaagcgccggtacacggctcgccagggaagctctgtcgacttctggcaacctgaccgttctgagtgacatgctcgacccgtccgagcccattgccaatcgaggggaattggccagctttgtaccggataccatggtttccttcgtcggtggcagccaggtgaccggtcgacccaagttctctcaactcgctcaatctcaggttgatagcagcccgacgtccggcaaggacctgctcttacccttggatggaggaagggatgacatgcgggaccagcaaccttcgcaggatcccatcgaggacgactccgaggagaattccagcctcgcccgtccgaaaactgtcagttttgccaaacacgtagttgctaccaagacgcgcggtcagaaggtgagtcggccgcatgcatgatccagtctggatcacttccaacaaccaacgtcacgtggtcttgcctcgtagcgtcaggccgaaacgacggaagaacctagctttactgtcaccgggttagtcagagaagactctgtcaccgcgagccagaccgtctataccaaaccggtcaccaagaagcgctacggtgacgccaacggcggggcgaaaaagatcaagacgcgtgcgtccgggagaggctgaaactggttcagtagaggggaacctgaacagcgcggagggtttctgatcggtctggcccaagagctgtaagactcgggtgggaccaaggctggtggcgtgcagtgagagaggcggtaccggtccctagctcttctagttgtaccgaagcaatctgttcacaggtatgcgactgtctccttttcagcgatctatctacacatccatacatccatcgcatacggacagggactacgttcgccccatcaccatagtgcacatagtgatcacccactggccactgaaatccctggctctctggatgtcccaagacactcccattcgcaggcacatgtgatcgaccgacaaggtggatcggggaatgggaattcatcgggcgtagaaataaggcttcaaaagatccggggcacggagaggcacgtcgtccgctcggatcaagggagggggggagaagcgccactctcagggggattagcccgagctcctcagccaaatatgtggcgcggaacatcttccacccatcggagcggggactttttattccgatcccgttgcccccgctccgccctgccctgcccgcgtgacgagaggagagcgggggatcgagtcgagctggttatctggtctcggtggttttcccatgcgcgcggattctcctaccccgatcgcgagaaagctttcacgtctggagaggattgcctttgcgaatgggacatgatcccgtttggttaacgagtcaccggactctcgggacgttggtgccatcactgtccctgtcactcaaggattatcatcgggcctatcgatgcgaaagactcttcgctcctagctgtctaatagcctcgatcgacaaatcaagaacaggccttgacatggcttcgagaactacctcaacaagtcaggcgtacccgacgtaaacttgaaacgagctcatcttcactcaaccatgtcgacaagagctcagaagattaaggcggtctatcatcctacgaaatggccagggttcacccgagcctcgtctgccgagatgacggcgttcggtgtcctcggtctgatcaactttatcgcctgtgggaccctgctcctcacccacctatggtgcaggaacacgctcgacattcctcgtcgcattcgtagacgatttcgatctctcagaaaggtctccgtcgggttcaaggaggaggaagacgactggttcgcccctgaacttcaggcggatcgatcgacactgaacctactagctgtcagctgcctctctaccccaccttggatcttgctctacctcgattcagccgtagcgtattcgacgaaaccgccggcgtatggagtgtgtctcgttcaagggagtttcgtcatgggatgggcggtgttcatggcagcaggagcgttcggggtggtcatgaaggtgagtcgaaccacgtacccagccgaaggacgtctcaaaaagataccacggtattgaccgatcgaaccggacttttgtagatctggccgaggattaccaggctcaactcgagcttgatgccatacataatgcctctctggctggaaatgctcgtcagttctcaatctaccgcgccggaactttgcaaccttccgctcattccgggtgtacacacgacacagctactagctctcccatgggtcttgctcttgacgttcttctctagcgctctggcggtgagtcccgaatcacatcacatgacggtggagttggaattgttgaaacctgactggtcatgtactcgggtcgccagctcgggattaaacagcctcaacgggtactcatgggtcaattctactgctggatcttcgattacaaactgtgggtgtataaaaaccaggctatcaatcagctctcgttggtcactgacattgccactctcgacgaacgcccgagcttgcaggcaacgagcggctctggctgtctctagtgcattgctcttggcagtcttgatgctcgaaatccacatgaccatcttcatcatccgatacctcgccctttcggacaaggtacataccaggacagcgtcccgaccgcctcctatgtcagaggcgagtgatatggctcctgggacattcatcgcgtcgtcagaggaaaacatcggtcagcaggatgtcgcgacgaagcgcgggaagaaggaggcaagacgtatcggaggcatacggataggggtcgtcctccgaccaatgggatttggtctctgttgcttggtgggactagggtgagcttgccgccggcgtttctctgtctttctccgtcctcccacatcaagctgacccctccttccaatattttgacacgaccaaagcatgaccacggtgacgctggtcatcgatcgaaccgctacgtggggcaagctcgttctggcgtctattccactcggagccttcttggcgtatgcgagtcaggtatgacagggttccatcctctgcccaagctgaagattatcgaggctgacttacggcacgtagcctgaaatcttgcgagtctggggcttaggccgtcttataggtgacacccgatcgtccggaagatcaggacctgcttccaacgacacagacttcgacgtgctttccagacgcggtacttcgtcgcagccaacttgggaatctgtcaccacggaggagaagggcaaatcgctatcaatggacaaggacgagatcgacccagtgatctctaccttggcttatgatggacagcctccacctcagaccgtcgaggcaacacgcttagaggacgaggtcagcccggtagaacctgtgacagccccgtcaacgtctggggccgacctatttcgcaagggcgtacgaggtgagtgagcgagtggacttcgccgccatacgtccgccaaggctgaaatcgttcggcgacagaatggaacattagaatcgatcaatcggatgtaagcggaggaggcagcatgttgccgcggaagaggtcaatatagagacgagacgagttttctggttgtatagtcgtgtttcatggtatcgaatgactgcgtcgttcgaatcgatcttgccctgccttcgttcggtataatcggtattgggaagcgatcggcaaggtatcaattacactggtcaggtacgtgacggaagggcgatacagtgctgggtttccaccgtatcttgcgatgcggcagttggggagcagggcgtccgttatctaaaaccgtggtggcagacatgtgactagacggtcggtctctgtcttctgcctcgattcttcttgtcttgtttcgtaattcttcgggtggagactttacctgtgtcgatattgagtatcagcagctgatatcaatacctattggcgcagctttcgactcgcctgtctcatccgtgataatcaacgtgcttccctcatcaaagacttctacgtccttgccggtccaatcgaggccggtgccttcaccaagcagaatctccttctgacgatggtttagcacacctcgggcccgtcccttcgtcgtggtagactgctcgttggcttccccggccatgtcatgcagtacgcggtgcagttcgtccctcgaaatgggatggcctttctcgccactttccttcttgtaatcctcaccactgatggcactatatcgctgtaaagtgtggacgatgggagccagaagtccacgacgttcggtcgtttccggttcttcgccgtccgtttcatccgtttcgtcgtcatccccggatccctcattctgaacaagccatttgggatgtaaagcaggatgaagagcggagccgagcaggaacgagggcactgtgacgccgtggacgatagtgctggtaaacaccatccaggccatgatcccgtatagaccttgtttcaactcgctatctttgggtaattcttctgcggctttcaagctgaaggtgaggcagcgccgtcagaaccataccgcggccatgaacgccggtagactcacgcgtaatagatcgctccaactcccatctaaacaaggtcgagatcagactttcgtcgacagggcaggatcgctactcagacgtaccggtccgaaatgccctacgaacatcgcctctttgcccgtcctgaccattggcatcaatcgctgtagaaacagcaccgacggcaaccgacgaagaaagacgacgcagcacccgaaccctacgagtttcccgatccagaacgggctggacttgtcgccccatgcttgccaaggcaagacggtgccgagcacgagaaagacgataatatcgagcacattgtcgatggcttccgagaagtgggtatgggtatcttccgtgtggatagaatcgttccagttgagagctgtccccgcacagaaacaaccgagcagctcgttcgagtcgatgtaggtaagctgtatcgtggtcagatcagcatgataaagggtcaagtaacgaaccgacgagcgactcaccactccggtcgtcaaaagcgccaaagcagcggtatagaccagcgaactctccttgtccacccattccctcttctttgcctgctcgagggcgactctgaaagtccacccaatcgcggtccccgcggcgatggcgaacaaggtctcccataggatgcccgtcaagaaccagtccttgaccgcttcacctggagccttggtgagcaggagcagtggggcgagaaagaacgaggtggccgagccatcgttgataccggattcgatgagcaagaggtgacgaatataaggtggtacgtgacgttcagcaaaggtacccttgacgacagccgaggccagtactgggtcggtaggcctagtgaaggggtaaggctttggctgtcagtgtctacagtagcgggtttcgttcgcactatgacaagacgtacgctagacaagctccaatgagcagagcctcgagccagctaacccggaaaatgctatccacgtgcgatcgtcgtgtcgtcagcatcttgctcctctttcttcgctcctcgccatgagcatcgctaaacttacagcttggcgaaactcccggtaatgagcgtcgcaaaaagcatgaccggcccgaggagcacgagcaggctcttccatactttctctcgtgcgatgaagcgggagggtaaagtgaccccgctcgtgaggacttggatggagagtacgagtcgggtgaactgatgtgatgtagatcagaatagggagagagtggtcggaggtaggacgcaagtattcgtagattgacgggcaggacttgaggtgagcacccggggtatctcgtgagcgaaggcaggaacggtagactcacccagaggaggacttctttggctttatcaccttcatggcccctatcccaactacccggcaagatcttgacgatgctgattggatgtccagaaggctcagcttggaagatctatccacacggtcagatcgaaagaaggagagaatatgtacctgagtacgcgtggtcctagggcgatccctattgtcaacagttgtatcagcatacggtcaggtcaccaaacagatgcatgtatggaatgtccgggtgcgaaagaagagcaaacgtgctgtgtcacttaccgaagcccatagccaagacgctactggtcaggaacaaccttccgcggatgaacaagctggtaagcccgaataggagcataaagagacctaagaatgcgcatgctagagcactatcgacacgctgttatcagtgattgtgcgagacctggggagactgtagctgacagatagaatacgcacatctgctcgtccgattcggcagcttgagggagagctggcttgaagagcattatcggcgatgctatgtcatccgtcatgattctacctggggtagggtttgacccggtgtcgatcgttcagactgtgctacggtcttgctaggcctgacaaacttcaattcgagccgatttcaatcgttgtgaggttgagtgacgaccagtcgagtggtgggaatgaatgattatatagaggtcgactttcgtttgaagtccttcgctcgatcgcaagcgagttcggtcttcgcctaaaaagtcgtcatcaactggaatccgcgaaactaatcgacaacgaaacccggtcaagatgacgaccacgaccttgatcggtcaggcgtggcacatggctaaccacttggcaagtcagaaggtcggagactctatacattcagttacatgagatggctctacaggttttcggtagtgaccggtagtggccagtgattcaaggagcgggtctactcatccgcacgaacagctctcattcggacgagaccgtgacggaacctgatcggattgaccggacgcctcaatacccatgcttgtgagaacagtccgcagggaagcggtgcacgatccgtccgaaacactagatcaattgtcgctatgaacagattctctacgactcgctgtttcgattgagcacatcgactgtcttgcgatcatggatccgcattgtcaagagaccttcgacgaagaagacccctcttgtcactccatcaccaggacgataaaagagagtggatatttataagagaccgccatgctatgcttcgaaaccgagacccatgctaatgaagaatatatatatacaagctgattatgatattccgagaagatgtttcgttcgctaatagtttatggaaacagtgtccgtgcaggtgtccgtattatgagaatgagcgtggcatgcaagaggtttgcaaagtggaaagtatccacatctatattggcgcgagatgttgattataagacggcgaaccagatcccggcgattcctaggacgatcgaaaaggcagagggagcattcaatccgatggccccgttggacgtgttcctctgtggttgaggggtgatgctggtttgagtggaaggagcgagggtgctcatgctagtcgtggtaggtacgacggtagtggtgactgcggtcgacgtggaagcgactgaggtggaagagcttgacatggtagtgctgttgctcgacgtagccatggttgtactgctgctcgaagcggcggcttgatacacagtaggggctacggccggagcggtttgtagcaagctgtgaggagaggcgggggacgagttgtccttggcgttttggtaccagtcctcgtcaacagtatcggcctgaaggcagaaagtaaagtcagtgaaccattccttatccgatgtgcaggtatgaaacaggtgccgaacgtttgactcacgatgttggcgagctcccatccattcgaaatcatgctcggatacatctcgataaacatgtcgacatcgtcctggttgagctcgtgctcgaggaaaatcaagccattcgatttgtctcccgtgaggtaatcgctgatagtctgacggatctcggccttgggggtgccgctctgcatcgaccaatcactaaagagaccaaagacgatgttagtatttttcgtttatcggtcctccgatatgagggaagctcaccgagaatcggcgttccaaacaacactagtcaggccaaagacctcaagggcgatggttcgaacccggttgtcgaggtcgccataaggaggtcgctgaataagtaaagtcgcttttagcgaccagtactctacccatgtttcttatttcccgctaagagtactcacccaatacttgggcactcgtcccccgttctggtcgtagataatctgcatggtccagccaagctcggctacgattgccgcattgctcatggtcgtcatgtactgcaacaaagtcacgcgatcagcatatgcgtgacgaacgaagtgatctctggaggcgtacaggatgcgaccaggtatgcacagcaacatgaccgcctccttcgacgagctgagcgaattgaccggggctgaagggaaaacaaatcgcaggtcaggatacgcctcagttgtgattgagtgtattcatactcactatgacaggacgttcgaaccgatgactattaggatccgcccagtttagcaagcgactcaatgtgtcgttcggttcgaaagggcttaccaaagtgagttcctacatcagagatatggttctctgccagaaaatcgtagagcgatgggctcgcctccgagggtccatcatcgaacgtgacctacaagtttcacagagaaaaatctaggatcagcgccggcagctaaaatttcgctcgacgcagctggtagcgcacgtcccatactcacaccgatgttgccctctcctgcgtacatgatgtccagagggttctcgcaacccgacgtgaagagacacacgctaggatcattactctgcaggacggtgccatcggcatcgatccacggagcagactccgaagctcgcggcccgtatgtggggaaagagtccgatgccacgacctgggccaaacggtcggtccaagcttgaggggtggaagacaagggtggggtgctatacccactgggatagtcgatcgcggatcctcgagcgaacaacttcgctgctgagctatcgggtgtttgaaaccatccgtcagatcgaatagggctgccggaagtcgagctggtagtgagagcgagagcgagaaagagtccagtagcagtccacattatgaatgaatcggaagatgatggttgaatgattgtccagacgcttgcttcgagttcgactccctcggaccttcagtctatttatgagcaagtcgacctggcttcagattaggctgtaggacctcgtagatagtttcgaatggcagggctgtgtcatgcatcgcgagtgacgccgacttgtcacaaatatacgtccgaaacaactagttacgcggctgaaaacgcctcttctaccggttccggtctgcgctgcgtgtctttcccgcccaagtatggccgagcttcaagaaggcgttttcaggaccgaggtctgacgcatgggagtcgcgggtgatctctcttgggattaggaagccaagcgggtcgagagcgcaccgctgtgctcgccatcttttttgctggcggatcgcccgctgccgacggctcgcgcagccgagatgtcgataggcgaccttcctggcctatatcgagcgggcgcgagctgatatcggcaagtgtcgatgcttgaaacagaatttgtgacatcactgaattgccggacgccatctagtgaacatcttcctgcaagacctcttgcatgctcaagcactgcgagtaacgttatcgctagtctttactacccaaacctccaaatcgctgcggtgtcttctcgtccaagcgattttttcagtttctcttttggtaccggaaaatacatccgcttcgcgacgaacgccacagtcgtcgtgccgccaaggctgaattggcactggacacttctgaggctctggcattgagacaaaaccaccacggtacagagtgcatcgctatgcaatcacgccgctatacgtgatcgtccgataaaccatgatcggacacagctcaccctcgcgggaattttgatgtccgaagacgggcaaatcctcgcgctccccgagcgcgaggtcacagccacctcgcgcgaagacggcggctgtgcgttgacgaacggtctaagtaagcgcggatagccttttcccaagtcgtgcatctcatgacccacagaggcagactccagagcgatgtgagactaatacagactccgattctacctgagatattgacatacgatcattgcttacatgctcaaggggatttgctgtgcttcaatacgagactcactgacactgcctttccctgcagcgccgcgcgagtcagtccggttccagctggcaggtgtactggcccatttccttcggtgttcagaggcatctcaggatactgccttcagcaagtcctatatactttttactctgacgccattattatgcttgtgcgactgccgcgtagtaacggtctagccgtcgagccaggtttcaccggcgattggcatcaaactagaacgcctgtttgcttcgtatttatcaacacaatcgattaaatggcaagaagtagaactgggaccgggatgagtgctttgtcaattgtagtgttcggatctgtgagacaccgaccacttgcggaaggaggaagcatattgtcagcttcagctcacctacaactacgatagttgggtcttctcgatgcttgcggtcgccgtccctggagacgaagctgacgatgattcgacttcgacgtcatcaattccaggaacgaaagcagagagttagctcacttctggtcgcaatggtcaatatcatgatgccctgcatccgacagatcctcatgtcgtttcgagcaggtcatggagtgaaagccagttgaaaagtcaaatggtatcgtctgctgagtgacagtgagaccgcgaaaaccttgggtaggcagaatcgtggacgccatttcgacatcacccggtcattacgatcgaatcccgaaacgatgatatcagcaaccagaagataagggtatcacggtagcttccagatgagagaatggctactataacctgagtctgacgtagcgattagccgcatttgaccggaaacatcgggaatatcaacacatttgttccaggcgagtacttgtcttcttccgagcgtttcgccgacttttctgaaccttaaatgaatcgttacggaagcaaaacgcgtgtcagccggtgaatcagctactgaatgggtgattcatctttacatgactttgctagtacaaatgtatagggagagatgcactcctgtatcaagcatctccctgtctcgacggagtcgtttctaccagactgactgtccaggggaccctcaacagcccagagatcaacgcgaactctcaaggtgaggtgacttgcgtagtgtttgattattcattcgcattctcgactgacgtgtatccgatatttagatgctttcgtctgatacgaacctcgcaacttcacatcctgatcaggtgctgccggtcgaaatcttccaaattttccaggactttgctgagtttcgcttgacggaactgagagtgtcaggatcaaatgagtctgtcacctacatggtatcaaaacccagggcttggtccgtcagcccgcttctgagcagttgcatggtttttgcctccctgatgctaccggaactccatcgggaagtcctcattcatggcatcccgacgttattctcgtacttttccctacccgacctggaatccttctattcgatacgtaattgtcaatcctatgtgaaattctccctcaacgctgtgtgatgtctgttggcgacatcatcgagcaacggatcctacagacccaactccgggacttccccggataccctgagacccatcgacattttggttcttcagtcgcagggctgaggtcttatcagcgcttttggagggaaaatctgcgacgtaacttggaatctatcgagattcaagaggacaacatctctttgctggccaggatcgccgaattgtgagtactgatcagcagaaaatcacgataatcgactgatctcttcatgtcccttcagttgggcggtgagagaggtcacgatccaaatatcgtcgaatcctccctttcatgcctacagcagtgacgaggaagaagatgaatggttcccttttcgttggaccaaccatccaaactttatcatcaacctcgacctctctgaaccatctgactttccatcggcaagcgaaaacgacctctttcttgaacggggcaagatcgatttgcgtgtcggaatgggatgtgtatatctgggtatcttgtcggagagacggactacggtcgacgaaatcatctgcgactttctgtcctacgtattcaagtcgaacagcgaccatcagatcactatcagcccatacatccacgaagaagttgaagggaaacatacgtggtgctttcccaaaaagtttcctgttattcacaagcgggacgtcgacggacatcgttaccctgacattcgtttcgaatcgccatgtgactgcgggcaaggagattacagcggaggtgagtgggttccttttggggctggaatatgagaatcttcccgcttatgctgtttttcttggagcaatattatcagtctgggtcaactgcgagcgtaccattaacagttgagtagcatcaagataggagcagagtctgaaattagacgcgcagtcgagaattgcttcggagtagctgctcatttcaagatgggtttcgggaagggcgcagaggggctcgtcttacccgggaggaaataagactagctaatgtcggagcaggcgtgtccttggacaataaatcagcgtaaaaggctcaatccgaatgtgaaggagccgaaacgctccgtcactccctttgtctgtccgtcagcaccctcagtttcagtcggcgagtagtatcgaccgtatggctgtatcagactaaatctggcgccgttacggtagcacttgtcgcgtattctgagatcctgccccagatgtcgaaccctgttagtggtttgtttcgtgactcccagcagaggagcagatatcctcaagtcggtacccctcagccaattggtctaatctctacatcgccatcaaagggtcattccgtttccgatcttcagcccgatgcacaccgtcttccttacgagatcttgcaagtcatccttgagtgttacagtacccatcgtgttcaaaagatacagaacctgtacgaagatagagacgggcggacaaaactaaaatacgggatagcgctcggtcccaaatggcccgtcctgccaatcttgcaaacttgcagctcgttccgcgatttgatgttccccttagtctttcggacagtcgtcaccttgaacaaccccgctctcgggcggttcttgtcgcaactggcctcttgtttgtatcggtacctcaaggagctgtccatccggggggccgatggaaatgcggtcttcccgattcgaagtgggatcttgcggtcgtcacagtcgtcattcaatgggagtgatgacggacccaacgcaccgagatcgtttttggccggtatcgatgctgctactagtgtaacctggccacaagatcagcgtcccaaggttgatacagtcaggttacttggttcatcagctggacttgtacccaagttgttaccaatgtaagtccgacgtagaatttcctgtcgttcgtatcttcccgctgatagggtctccccagattcgagatacaacaccttgtaatcgaagacttctgtctcaaagaggagacggtgactctactacctctcaggcattgcgccaagttcactcttatctgccgcccggaccgtcattacaacgccagaaaaggtgtaacggtgttcaacgatgacaagctaccacccgccgattcgccagccaagatcgtactcaaaatcggcttggaagacaatagagaacccattaattcactgcgcctgggaaggccttctcgagcagttcactccgtgccggatctggtctcgattttctgcggagagtctttacccgtacaagaaatccagatctcaccgtacatggaacgaaacggggattctcacacgtggtgtttcgggagtaagattcccactaaaattatggctccggcagggttggcgcatgtgacatttaatacctcgtgctcgtgtgagacaggagaccagactcgctgtatgtgggcatctcaggcgcttcagaccccaatacctagctgaccgggctccttgtcgccgaaagtctgaaaaggtctcgaagaaaagcttcggtcgcacatgcacatcaggtggaagctcgcttcagaaagtccttggtagccacatatcaatatcgataaccgtgtaaatttgcctgaatgggtttctttgtcgacattgattcgcgtttcaggttttatcgcataggccggtaaccaaaaggaagcgatgacgtcaacaaaagaacttaacaaaccggcgacaattgacgtccaatcagcccaaatcgacgttgtcatccagctgctgccagctgcttctacaactcatattctacatgctacgatcctatttcactcgtccatcttccgtacgatccatcacagctcgagtccgccatcagcgtgtgtcgcaacactttcacggaactttcacggaccattaaatctctgcttcttggctaccatcttgcgagtcgctaacacgataggcgccaatgtacatatggagacgtatgcccgatacagaaactttcggttaacattcggagcctgcaattctggatactggaactattttcagcccttccaatagagctcactttgtttgcatcccacaggaacagattagtccccttcagacagggcctgcacttctcgcaggatgcccgaaactgtagagggttccgactgtgccgacacccaggctctgaacaacggacggttgccagtcgagatcttacgcaaaatagtcgaaagctacattttcttccggtacatagaagtgtcggaatgggcggtcggccgacaccatgtgtaccaatggcccggcactcgtcaaggtcgattcaagggccagcgccaggagtgggggataatgccgctgctcattagctccaaaactctctatgcgttaactttacctttgctatacaagagggtggtcccttttaacggaaagatactggagcaattcgtaacagattcagccgtctcgtcgtgtggacatgtacaggaaggggtcatgtgggccggctctcatgattccattgatatcggagaagtggtcagagcgagggagacgcaattactcctctgtcctttggtggaccaaaattggcacattcgcttgaatcagaccccatttaaggatttccacaacaagctccagcaatggcgagacgatctccgacccagaatcgacacaatcgtttttcacgaggatacgccgccgaaatatcttacgcatatgcagagcttgcgagtcggactcgatcaacgacgaaaccaaaacaagttgcgctaatatcatcagacctaggttcaaagtcaggtgcttgaaggtcgatttctgtcgtgacaagaggccccctcacatggacttgagcgcacttgacatggttgcgtttatccgcagccctctgcggaacgtcggccgacaattcgatcccagcgcttggttgctagggtcaggcttctcaggcgcgttcgtaattcaaatcggcaatctcctacgggacgatgtatttttccccgaggaccccgttatctccaagcatgaacactataaaccggccgaccttatcgaggaatttctctggcaggaggaaggctgcttccagaaaaacatcattcagccgtatttgggagaagaaggagtcgaccacgattggtgctttgcggaaccgatgaagaccgtaaagaccccagccggatatcccaacatcgaatttcaatccagctgccaatgtggctatggcacaacctctggctgtgagtcgacaccgtctgtcggacactgccgcctgttgaatagagtgtagctaaactgaacgacgttcacgcagactgggatggggttcgagacagattgcttttcttggacgagatgcggtttttctagatcgagacacagcggcgcaggcctaagagacgggtcgcttagtccggaaccgctcgctgttgcctcgatgcaggaccattaccctggcatcctgcattcctcagacgacgtatggattcatgtctgttcgaaaacgcaagccggcgtgatccggcgtagtaggatttggatcgaattgatacgcgtgtacaaggcctgccccttgcccgaaactatgcttgtacatgtaccgactgttcctccttgacttgttgcgactgggactcctccgctacctctttcgcctgctgggcttctaccgccccgctgtgcgtcgagctttgaacgctcctgttcctgctcctcgtcgacgacgtcccccgacccttgagcgccttccacttcatgacgtaattcaacccgtccgaatacggcatcggggatccgtgtgaatcgagatcctctaccctggcctttccgtgcgaagtggcgagttcgtcgagttgagggctccagctgcgtcgtttagggaggttgggaccgaataggaatcgggtgggcaagggggccgaggtggggatgttgttgccgtgttcggtagcgcccgaggtggatgatgaagaggcggtgtagttggtccgtaacgcccgggtttcaaggtcgaagaaccggtcctgcgttggagacgaacgatcagtcgacgtcgatggtctctcggcgtaatcatggtgcacgtacgaaagccttcctggacgacccatccctctttacgtcgaacccggcgtcggacccttcataagcgagcgcttcctcctctgcggcgaacctagcaatctcgtcgatcgcgcgaagtttgataaactgggccgtagcgatctggtatgcctgggagagggtgatcgagtggtgctcgtgcatattgatgacaaaagcgatggtgctgcatttgcaggcgagaaagaggcaagagtgaggggaatagtaaagtatcagtcgcaagatctggtatacgatcgaaaggaaacgatggggcgacggggcgatgctcactcctccacggtaggaacgtctccacgctgtttcaactctgtccattctttcccctcgacgacgcctgcccttccttcacctacggtctgcccctcgatcaagctgaccggcctcaaagcctcgaacgggaaatccgtaaagaacctcctcctgatctcgtcctcctggaacctcaattcggggaccttgagcttgggcgtcttggcccgtttcgcacggtgggtgatatcccgcttgtcgatggtggtggtctgatcgtccgaggctatcgaccgggaaaagagggacaggtcgacgggtgcaagtcgacgaggagggagagattgaggtgggtgttcgaggtaggcttggtaccagacgggaggggtgatcgtctgggcttgtagcagacgagtgacggcctggggcacctgagtcgccaactttcgaaccatcgcgaggggggattgatcgtgaggttttttctctcaagtttctacgaccagggtgtctgctcgttgatagtacgagttgactgcttgtgtcactagtgaggtatcgtgtcgactatgaacgacatcgtccatcgtggtcctagttgttgctgcatgcatgcatgttcccgacttctctctctttccaaactcgaccgtcacgtgattcgttgcggggaaagttgggaaatatgtgtctcacaacaaccactgaccctgttcataaccccatcacgacatcctcccattcaccttgaaccctttgctgacaatcaaaagcaaacgctaaggaattgaccccgaaccatgcctaaatcgaaatccgcagtgaaaccgcccggtcgggcgaaccccttggccaagaagaacaaggccaaacgacctcaagtccaggtcacttacgaggacggccaatcccgaccaaacgttctgagtgtgccacgaaaggatatcaaggggaaaggcaaagccaaggatgaagatgccaacgaccaagacctcgctagttcgagctctgatgacgacgaggaagaggatgttaaacccatcatcgtcaaggaggaggacggcgtcttccagaccgcgttcgaacagtccttggcgggcgggggggaccataccggtcacgcttcgtcggcggatttcatcatcatcgccgggtcttacgaaaagaacctgtacgggatcgagggcacgttcatcacctctgtcgaagacccgacatccgacccggaattgaagctcgtaccgagtttcatcttccccgcgcacttggcgtgtatcaaatcgctctcggtcagccagggtgcgaaatggttggtcacggggagtgacgacgagtatatcaaggtctgggacctacggaggagaaaggaggtcgggatgctcaaccaacatatcggtcagtacgagttctaggccgtcatctgggtcgtcgccatcctggcccagtgttcccttccttcctctgtactgaacgcccttcacctctctgtgcctctctcgactcgcctttaggaaccatcacctccttaaccttcccttcctcctcacacttactcagtacctcggaggacgcgacgatcaccgtcttccgaacgcgggactgggtacccctccggacgctcaagggacataccggcaaggtcaactgcgtggacgtccatccgtccggaaaagtcgcgttgagcgtgggcagagatcagacgttgaggatgtgggacttgatgcgtggacgtggggccagtagtttagggctcgggttcggtaggtcttgtctcgccttttccttggctatacagtcgcgggtgttggggtccatcgctaatccgaaggaaaaccccgtcaatgtcattcatgtagaggccgagctcgtgcgtttctccaagtcgggcaagatctttgccatcctcgggtacggcgggatcgaaatttacaccatcgtgagtcgtcgtacacctgggtggacccccaggacaaccagggaagcatacatggctgaccctcgaccttcctccgggggccgactctcacagggcatgaaaaaggtagcgaccctgactcatcccaagcggaaacggctgcacgatatccggttcggaaacgtcacctcgcccgagggggaggatgtcgagttgctctttaccgggaccgaggatggcaaggtgtacacgtgggagattcaggaagacgaggtcgacgatgaggatggcgaggtctgcgtgctcaagggtatctttggcggacattcgaatcggtgagcacaacaaggcgaagcgatgcgagactatgcaccacgacgctgatattccgatgaatttcaaactattcagagtaaagaatgtcgactttttgatcacgaaacgaccggctcctcatccgcccttgcccatcatcgtcaccgtctcctcggacggcaagatgaacgtccacgacgtcacttcggtattcagaaccgactcggtcgaagacgagatcattcctatggccacgtatgacacgtcgggtagccggctggtctgctgtcgagtcgccgcggtcacgaggacgaccaagcagatcaagcaggagatggccgacgtcaaagtcgggtcggtagtcaagaaggaagatgccgagtcggcgaatcagctacgcttcaaggatggcggcgatgagagcggggacgaggctggcgaggcggatggtatggacgaggatgaacgggagaaggagcaagaggaggaggacgaggaagagcaggagctggaggatgaagccgaggaggagtagagtttcggacaagcctttcacgagtcttgcagcgggacactagcaacgatatacatctatatatgcatattcatattcccatgcaaatccccgcgcttatcggatctcgctcgtgaccagttcgagaatttcggtcgtcggtttgccaacgttcttcatgtccttggagatgctcggccagagctgaccatgtttgggttcagccgcggcacacttggcgatcacttcgtcctgtcgctcctgcacgagagatagaacgccgcatcagtcaagatcgcttcactgcagcacaacccgttcgacttgccttttccccatgttggcgctcaaacttcaaccaccatgcccacaggtcaccattgtccttgtccgcattgaccgctcgacccaaccatagcctcgccttttcaatcttgcgctcggcccagaacaatcgaccgatggcgcaaatgacgatcgggttctcgctcgactttttgatggcgtcgaccgactttccttttcggcccgaaccaggttccatccagatggccatgttccagaggataccggatagaggacagtcctgttgggctcgagccaacattgtctttgcttgacctgcgcttcccgcacggtcttccaccttgatcgattccgcccacagctcctcgctcttggggttttgcattcgagccttttcgagtagcgctcgcgccttgattgtgattccggccttttcttccagtcttgatgagaggatccagagggggatcgacttggggcacgccttgacccccttactgtaggcttcccgtgcacctggaatgttgtccctgtcctcatagatctgtcccttcatcatatacaacttgtcaaagttgctaaacttgacaatggcctcgtccaacgtcttgatggcttcgtccggtttgccgagttgacgcaagaggtgggcagatttcatccagatctgaagggcggcagcgaacggtcagtcgtgcgttctctgcggcaggagtgattgactctgctgctcaccctatcggtatcggcctcgattctggccttttctagtacctgcatggcggcctccatctgaccagtctcggcagcaagcttggcagccgccagccagatagactcgctatcgggattctgctcgaacgcttttgtgaggatatcccgagctccaccgatatcgcccgagagccatttctcctttgcggccatgagccataggacctctgcccggggacaatattcgacagcctttgccaagagttcttgcagggcttctctgatggtcatcaatccgtcagtgatcgctcgatacatgcgtccgatactcgctagtactgacggtgttccgtgttctttttcaaaatctgcagccgctcgccatacagcctttttcgtgggaaagacttgaatggtgtaggcgtagatccctcgagcgcactcgacgaaaccacgtccggtcgcgctttccgcgtcgtcgagccagacagcctgcctatcttcctcttcgacgtcgagatgcaaggtggccttgaggatggcttgtgccgtcgccgggctgccctcggtctcgcacttttccgcttccttcatccattgctctcgcgtcatgatgacgttgtgtttcgtcaagctcttgacggccagggcgatcagcttgtcgacagtctccttgcttccatcctgttctcgcagacgtcctccggcgatccagatctcgtgactcgtagggatcatcttgtgagccctgttcaagactttttgtgcgttttccggggtttccagtctggccaacgtcaaccacaattcgaccgactgcgggatgacctcgaccgctcggccgagcaggatccgggcatcatcgggatcgtcctcgaggttgaccacttccttccagagcttgaccgagttgggaatatattcgagagctgcaatggcatgtcgcgtgagctcgtcggctcatgatcgcctccttgctcccgccgcctcaccttttcgaagcactcgttttttcgccttgacgtcggcctctaggtcagcagccttgagccagatcttgacggattgcggcaagttctggaccgccttggcgaggatgacttttgcgttttctggggtctgaattggcaatcacgatcagctttcagcgtacatcagcgagtgacggatatcggtcgtacgttgagctcggcagcgtgaaaccaaatgtcctcgtttttcggacactgctcgcatccctgagagatgattctccgtgcggcaaccatcttctttgcgtggactgtagacagtgataaggaaagaggctttaatcaatggatttactcgcgccatccaatatgagggccggagaatcataccttcgagcgatgctgccgcgatccaaccgggtgcgtgcttcggattgctcttgatgacggaatccaacaattgcctggctcgcttgatatcactagagacacgcgaagaacactgtcaacgacgatagtcgcccccggcgtcgtagatggacctcgggtcgactcacccgatctgggcatcgctctgcaagacctgactgttcaacgcggtcatgtaccctcgaggatcgacggtcgatgacaacccgctcgccgaggcgtccttggaagcctgatcgagctgcaaggacaagactctatctcgagcctgaccgatcccgaccaggtcggtctctgtcccctggatcaacgccggagtgtcgaacccttcccccgacatttgtttctcgtcgagttcgttgaccgtggcgttctgactgacggcgcctgccaagatggtatccgatacggcgtacgtctttccgttcccattctctgccatcctcaagttggcctttctccgtcttctcgtcagatcaccgacctcgggcaagttctcccactcgttatccgtaacgtcgctcaaccctcgtttgagatccgcaaacttgacgtcgagtttgacgttggtcgcgcgttccttggcgagctcttctgcctcgatcgcttcccgacgagcttttcttcgaccttccatgtgggattccacagagtcccagatggcatcggcttcggcatcgtcggcttcgtagacggtacctgcgaacaagttgctctcgtcatcgggatcaccaaacgcctcttcctcttcttctcctcgtttcgctttggcttcactgcgacgaagttgggcgaggcgggatggagatgaagaggggggggtaagtaggtcgtccaataatgatcgggatgaatttgatcttcttacgcgatagcctcggcgctcggtccttcacgagcgggaccgatatccgatcgggttgtgaaaccagaagctctgtttgtcacgtataaggtcgacaagtcagattctcatacgtttccatgcagcatatgggcttttgacgtgttggggactcaccctcgacctagacccgctacgtaactcgcaggagcggccagctgagtagcaaacacaggaatttaagtttattcctctcgtcaggaactcgggatcggctgccactcacgtgcaagaaagcatacttgtccgccttttggttcaaaccagcacgtaatgacattcttgaagcaggtctactcgaatgtaaaggccgagtgtggcgggcaagaccgaagtcctgatatggctaagcgttcacgagcttgtcgggtttacgatcgtcgaacggcctgggttctttcggcactcagtagtacgggcaggagatggctatcctctgtagttgaatttctagtatctttggtctctagtgcgattgaatgcatcgctataaagtcgggatgacctgctctcatctttgtgaagcctgttcgcttcatcagttggggggtgatggcgatgacacgcggacattgaaaatgatatcgccatgtccgtgatgacacactcacttacctcgaggggtaggaggtcgatatattcatagacacactactacatttgcaccgttttctgtactgcgcccataatcatccccactccatccatagacatagatcgaacggataatcctcccataattggtccaactcgaggtcctgaccctacgacacctcggtctgctgcatcaggactctgtcgattcatcgcccgcgacataccgctcctttacttttgaactcggtacccagacccgtgggtatccctcgaccgaccgatcgtctctagcccagttgccaagatctatcgaatcttacgaccaccccgcgagacttgaactctccataaagacccaaccctcaacctgcatggtacactcctaatcgctcaaccggtccccgaccctccctcgctcaaggcccccgcaatccgatgcccagtcgactccgaaggacccgttcgtccgctttccgggcaaacgcgacctttctctcgcccagcaagacgtctacggcgagacctaccaaaaagttgaagctcgatcgatctaggtctttggcgaggcctgtactgggcaagactttgggtggggagtcggatctggaacaggaagaccacgatgacgacgacgacgacgacgacgacgacgacgacgacgacgacgacgacgacgacgacgacgacgacgatggcgaggaggaggacgacgacgatgacgatgaccgagacgaacaggtcgatacggatgagcgtgacgaggaggaacgtccagaccaggagaatatcgaccctgtgaccagttcgtcggtcactaccggacccagccgtcgtcgtctacggaacgggaagagcgtgcttaggaaccacaatcgatccgccggactcttgcgttctcgtcgtcagaaacgaactgcagcatccttatcctcgtcgataccgggtcacagtccgagaaagaggaaacgggacgacccggagtacaccgacgatgatgatgatgatgatcgggcgggcgtgatgagcgacgagtttaccgatgatgacgaggtcgaccggctggccgagatcattgacgaggtggatgaggatgtagacgattcggctgaacctgattatatcgacgagagtgagtgccaactcgagcccataccatcgggttggggacgatgttcccctttcagcccggctcgtctgaccaagaaatttgtttactttgtgcgcgcggcgtcaaccctttcgcggatctcgaatcatcgatcgaccggaaatttacccctatcttgatcacctcgactctcccaaccataaagacgacgagcacttgctacgggaagcaccgacttggacgctgaggcggctgaaaaaggccgagttgaagaggttgtggttggtcgcggggctctgggatggagaagacgatatgggtggggacgacgaagtggaagtagcggatgacttgaccaaagatgtcctggtcgaggggatcatcaaggctgtgagtcgaagtcgaggtccgggtcgtgggttggtgaacaagctccccgactgacgagagtcattgcttgtgagctggtagagaccaccatcatcagcctcgacggcgtcatcatcgacgcgcaggatagcgagactgcctccggcaagtcgggatgcgatgctcagggacacgaaatacagcacttccagatatgattctcccgtgtctgcggatgaccaggaaggagagccgcagcccagtcaggaaacatctgccagtcacggttctcaaggtcgatcccgtttgacctcgatcaacggaaacgcggggaacaggtcgatcgcctctctgaaacacgccaacaagacgcgccatagtaccggttcgaccgcgagtcaggacaaacgggcgcatttcgaggtcaacctccagagtcccgctcagacttatcggcatcgacgtggatcgcatgcgtcgtcggcagcgagttcttccgcggccagtgccaatggttctcctaaacgaaacggcttgccactcacgccgcgtccgctaggcaggcgagggaaaggatcgagaaagagcgtcaactttgacgaccaagccgacgaggccgccagcgagtcgggatctgtcagtacggcgggtgacgatgagggtgatggacagacacggccacggcgtaatggaagatcgctcgcgaaaagggggagtaaggcgagtctcgagatgatcttggacgacgagtcagagcgacccgatgcatctaacaaggctatcgggacgaggcggtcgagtctgattcgacatacgccagccagaagggccgctaggaaagccgcgagggcgatgcaagatcaactccattcgaacgatgacgagatgatcgacgcgaccgacgtcgacgcgagcgagcaggatagcatggctggatctgatgatccgacgcctcgaccgaacggtggcaggactggaacgcgagcacgatcgtccaccctccagagcaacgattcgtcaccactgcggagaaagactaggcgaccgtcgacgtcgacgctcctcacctcgcccgacacggattcgagcagacggagcagtcaaaccagcgcagatcactccagtgacgaggggcacgagcacgagttggcgagcgcttctcagcagtccgctcaacgacgcagaaaggcgaagcgtgcaggcaagcgaagagatagcggatacaacctgagacgaaacgatagcagcggattcgatctcgatactcgactcggtggtatcgatttgacggacgatgacgatactaccatggttgccgaaaacgcagatgcagatgaggacgtcgagatggcggaccagatgtcagaagacaccgagacgccacatgacggcttgcacgaggatgagcatggtgaagatgggatttcaggtgagctgacatcacttggcaggagccgacccgctatgcttactaccggcgattcccgcagacgagatgctggctacagcgactcaggccacactccgcaagctgaaaaaggcagtattggtcgagatgtgcgaggcgagagagctagatacggagggtaccaaggagcagctgtcacaatggctcatcgaatgggtccgtcgacggcgtcttggctccaccttgacgacgttcgaaagactaagacagttgtccttttacagagagactctggctctcggtcgacatcgtccgcatctactgcccggccagaaacgcccgtgaccgagaccgcgcctgccaccaaaactccttcaggcaaaaagaagatctccgtgccgaaattgctgcgggatcacggcgaggtagcggacccgcacacgccagcccactctcacggagacacgaaagaggacgtcgaggcggacggtatgctcgacttggaagagttggggctggtcgacaaggagataccggtcgagcaaattcaaaagggagacaagattggtagtggaggcttcaaggagtgagtgaaccccggcttgcccacttgaacatgagcctgttgacagtctttcccgtcgaaaaagcgtgttcattgggaaactgcgcggccgcgttaaagtggctgtgtgcgagtttagggacgaattgagcgagagtacgtgtaccagtgcccatgacatgcgtccgttcgtttgtttcgctgaccgtgatgtctttgcagtggacattcgagagctcaagttgttggccgagttcaaacatgctaacatcgttaggctggtgagcgccagctccgcgtcatgatggcccttccgacttttggctcacaattcccggatacagctcggcatcgctatccctgaacgatccttgcacataccttgcatggttgtgaccgaactctgtgagaagggagacttgttcgactacattgtgagctggactggggtgttgagctgtatcaaccgatcgctgtgctgagttgagccactttacagcgaaacgtcgatctgcctccggtcaacaaggttgtgagtgtcgacggaaacacgtctcggcccaatatctcactactgatgcataatggcctatatagctcaagatgatgctggatattgctcaaggcttgacctatcttcacgaccgtaacccacgggtgatccaccgagacgcaagtcgatcgatgtgaattgcgcttcaagtctaagactgacgctcctcgtcatgcatagtgcaagtcgtccaacatcctgatcactaaccgcggagtctgtaaagtcggcgatttcggtctcgctcgggtgaagaatacgactcggagcgtgattcgatcgctggtcgggacggtcaattggcaagcacccgaactctggagtcccaagccacgatacgattacaaggtggacgtgttcagctgtgcgatggtcttttgggagatgcttgcaggttggttgacggataaggtgcgtcggtgcgagtcccacagatcggccgccgggactgatttcgcatcgtttatacagaaaaaatatccttgggaaggcgagaacgagcattggatctatctcaacgtcggccaaaacaaagtcaggtatggtcatctattcgagatcgagtcgtcgtcatcgtgtctcacgcccttggcatcatctccagacccgaaacggctacattgaccgagcattggggttttgagctggtaaacttgatggagcgcatgtggcatcatgacccaaacgagagacctcttatgagcgacgtcgtggatgacctcacggccatcatggaagcgcgccgccattcatgaaggacgctcttgaacgactcgccgcagaaccgaacacggacacgatgacgatacgcatggaggaatcagcattgacattatagcatgtagcagtagatatacctgaagcgaacgaatgtatccagcagagcaagcacaatgaattgagaggtcgattttcgctttccggaacccggcatcaaggtttccgtcgtacgagtacgcgatgcagcagtactcggcaacccaagtcgagctgaaacagcttggtccatgtgtttgaccagtctctgtcatcagcagggtctctctttgacacatctatgacgattacgaatcatatgcctcgtctacgaatcatcatcatcatcatcatcatgaattggtttgactgattgagcccgtttctgtacacacgttcacccggcccgacgcttcatcgcctgccatacgtggcccatgcgccactcccctcttgttcgagcaagaccccggcgctacgtttggcgtccaagaacaacgagttcatctctccgatatcctgcacatcgatctggttcctacccgacatcttggcgatgatggacgccggagtcaagagttggagcgcgtacctgcggggagaggccgagtcgaatcagtacatggagcgacacgttacgggacccggtgggcatcgcatcgccacgacgaaactcacctcaatgaactgttcacaccctcctcggcgagcttgtccagcgcctcgggactgacgtcgagcccctcgaccctgcacctggtctcgagcacgtgtttgacctcgtcccgcttgtaagggtacgtacggacgatcatgcacctgtccagaagatccatggggatcccgtgagggctgacgagcccgccctgggtgccctcggtttccgtcccgcggatgacacagttgcctcggttggaagcgagcacgacgtagggggacatgggggactcgagcgctcggttcaaaaaggtgaagcattccatgtcgagcatgtgtacctcgtcgatgaagagtacgccggggacgagttcggcgacgccttgttcgatgtaccgatcgacgaccttgttgatctctctcctcaacttgtcggtaatctcggtcctacccccacggacgagctgacccatgacgctcatgatatcctgcccaccctggggtcgcgcgttggccatgtcgagatcgtggagcgtgacgtcctgcacaatctctttacgcttgtgcacgtcccccttgggcaagggaacgtactcttccgcctcgagatcgtactcggtcgcataagcgtcgctcctccctaccctcttgacggcaccggtgttggcttcgatgtagatgacgtccccgacgacgacgcgttccttttgaaggctctcgtagatggtcgggtcgagcttcaactgtttggtccccttggccgtcttgagaccgacgacgacgtgggagatggtcttgccgtacccgctcaacgggttctcggcctcggccggggtgagctcggtcacctcgccctcgtaaacctctttcgtctcctttatccgaaggcctgccaggggtggggtgggggaggtcagtcatctcgtcagaggtacggcttgggtttcgccgcagcaggacagaccacactcaccgatggctcgtctgaatcctccgctgaggacttcagtctttttcacttccccgctaaagacctcgcttccgaccatcgggcagaaaggtaccctcgccccgagttcttgagagagtgcgagcgagagagccgtctgcgggatgatcatgaatgatgtataggcgttgggtggagttgcgagtcggcaatgacaaaaggaacgtagagggtggggtacgagcgtggtagtagcagtatgtaagcacttttcccgctcgacgtccattctgcgccacatcttccgaacactcaccttgccggtacccgggggccctacgagtaacaacggtcttcccgaatactttccactcctcaatagacccaaatgcaagcctaatgcttctctcgcctgagcctgtcctacgaacccttgaccgatggggagggcgtgaccctcggccgagagacctagacctttgatgtgcgagtgagtatggattcgagagtccttgtttggtgctgatacagctggggtcgtcgtcgtggtggtggtggtgggtgcaggggtagtactggtactggtgctggtggaaggacccgcagtggcaggtgccatggtcacgtcggtggtcatcttgtcgacgagaaaaaaagaaacaagttttcgaatgcggtggtggttctctaacggggcaaacgattatctctgccttgtcctctgatggttcccttgaccttgatgagtgatggtggtgatggatggtgtgagagagatagatgatggacgacccaataccatgaccatgaccatatcatcacccttcccccccccaagacgctgtcatcacgtgatgtttgtgtgtgtttcccttcgagttttccaagatttctcatccgaaaccgacttttggtctccctcgtcaccgccctcatgcacagtgtggcccggcgctgggatgggtttatcatcaaccactctcttccacacactcttcaacacccccaaccacctggttgatcctcttcttctggctctgaaaacgtatacccacacctctcgaatttatcatcccaccctgacgacacacaccgacacgcacacaccatgtcctcttcttccacctttctctccccggaccaggccctggccaccctcaaagagtacgaatcaggggacggactctcgttgagagagttgatggatacgaggaggaacggacagggagggttgacgtacaacgatttcttggtcttgccaggcaagatcgactttcccgtgagtaggcgagcagggcgagccggcgcggcgagcgcagcgagcacaaacctcttgcgagcagagcgagccggcgagcagagcgagcgtaaacttcttgcgagcgcagcgagtatcagactcctgcgagcagagcgagcacaatcaaatcagcgagcagagcgagcatatgcaaaccagcgagcaaagcgagcatgttcaatccgcgagcatagcgagcaaaacgctcctgcgagcgacagcgaacatagagactcttgcgagtgcaacgagcataatctattggcgagctggagcgagcagaaagaaacccgcgagtgcaacgagcatgatgactatagcgagctggccgacgaccaaaagatggtcacggaagctcattctttgcacacttttatccccacctgcttttcctttcctctcgcctcgatgcgatgactttttggtccatgaatgtcgattcgccggcatcgactcgacgttgcaaacttgcaaacttgtgccccgtcctgccgctttcctcgcgcccgtgctcgacgacgacgacgacgacgacgacgacgaaccaggcctcggatgtctccctccagaccaaggtgaccaagaagatcaccctgaacagccccttcctctcttcccctatggacaccgtcaccgagacccagtacgcacctgccatccgtcggcgtcgaacagtagcatgcaaccgggccgagctgacctgcgtgttcctgtcgtaccgtccatcgcgtctcacaggatggccatcgccatcgccctgcacggaggactcggaatcatccaccacaactgttccgcccaggaccaggctgccatggtccgcaaggtgaaaaagtacgagaacgggttcatcaccgatcccatctgcttgggagccgaggaccgggtcgaagagtgagtactggggcgaggtgacgcgaggccagggcgcgaaagacatactgatcgtgcccactctgttctcgacaacagcgccctcgagatcaaggcgacgctcgggtttggaggaatccccattaccggtgagtccactcgattcgtcacccacgccggccgccctcgctgacgacgacgaccacccggcatgacagagactggcaaggtcggtggcaagttgctcggtatcgtgaccggccgtgacgtccagttcagggatgcctctgcccgactggccgaggtcatgacgaccgatctcgtcacgggcaactcgggcatctcgttgcaggaagccaaccagctcatccgggacagcaaaaagggtaaactccccatcgtcgacggcgagggcaacttgatctcgctgttggcccgatccgacctgttgaagaaccaaaacttccccttggcgagcaagttgcccgagagcaagcagttgtactgcggtgccgccatcggaacccgggaatctgacaaggacaggctcaagttgttggtcgaggccggtctcgacgtcgtcgtcctcgattcgtcccagggaaactcgatctaccagatcgaattcatccagtggatcaagtcgactttccccgacctccaggtcattgccggcaacgtcgtcacgagggaacaagccgcccagctcatcgccgtcggtgccgacgccttgaggatcgggatgggttccggatcgatctgtatcacccaagaggtcatggccgtcggtcgaccccaggggaccgccgtgttcgccgtgagcgagtttgcgcgcaagtttggcgtgcccaccatcgccgacggtgggatccagaacgtcggacatatcgccaaggcgctcgccctcggtgccagcgccgtcatgatgggtggcatgttggcggggacgaccgagtcgcccggcgagtacttttaccacgagggcaagcgcgtcaagacgtaccgtgggatgggatccatcgaggccatggagcatcaaaagaagaagcccgcctcgggcgtcgtcgccgccaaggtcaaggcggccgggatcaccgtcgcaccctctggtgacgacaatgcggcgacggcgaggtacttttccgaagccgacgccgtcaaggtcgcccagggtgtctctggggacgtggtcgacaagggcccgttgagcaagtttgtgccgtacctgtacactgggttgcaacactcgttgcaggacgtcggggtcaagagcgtcgaactcttcagggagggagccgacaaggggagcgtcaggttcgagttgaggaccgcttccgctcaggccgagggaggtgtcagcaacttgcactcgtacaccaagaggttgttcgcctaggaggggtggaggcgccgtccccttgtattctatatcggttgttgtttttttcttccacgtcgtcgacgagcttgaaaccgatacattgctattagatcagacagcggtgtgaggtggtggtcgtggtcgtggtcgacgtcgtggttgtgaccgtttctcgcccaagttcgagttgtgaaaccgcgttttgattcgcctgagacgcgaaaaacagaaatcaacaacacacaaacacaaacacaagcacgattgatacaggatcacatgcagttgtagtaaaagtagtgtgatggtcaactatagacaatagacatcacccacacatacaagcatacaccggctctaaccgcctctcctcttcttgttccccatcatcgatccaccggcatcgcgcaacgagcgatcctgggctgatggttcgtccaacccggcgagcggcggctaaaccggtcaattacaacctcgacgattatcctctcgaccctgccctcctaaacgatcatcatcacaacagcaaccacgacgacgacgacgacgataacggcgagggagattacgctcctgaagctgtcatcaagacggacacgaagatcagggtcgagagggcgcaatccacggtcaacaagatcacgctcaagttgccatcgggatacaacccgaatccgaccacctcgcggtacgttcccgaccacgccgacgttgaagccgacgccaacgaggaggacgctagtggagaggaataccacgatcaagacgatccgatggccggtgcacgttcgacccgttcttctgcccggaacagcggtcggagttcaggtgggagttccaaccatcatcatcctcctccaggttcgtcctccagtcgacctgttcggacgtcgggacgtcgaacccgggctggtcatcagcatgaagatgcgcacctggacgaggtggccatggagaatgaggaggaccaagccatcgtctaccccgacgtcgacgctcaaggtcgatcacaagcccaagctcaaagccgacgaccttcgcgttcgacccgtaccaacaaccttgcgatcggacttgctgacgagaccgagccgaacgaccgggggacggcggaacagactgagcagtattacgacgatcaggatgccgagggggaggtcgatgacgagtacgtcgaggaggaggaagaggtggaaccgccgggtgagtttctctttgtctctctctctctctctgtcttgtcttccttttctcgctcgtttgtctcgtctggttcatccggagtcgtctgtatcggtcggtcccgttcgatggttctgtgtctcccgagtgacgagcgaacgggatggatggttgggtatctctgggacgaatgagcggttgggtgatcttttcgggttcgcgagaacaaagaaggatcggcggggtcgatcgatcgttgaatcgcaagaggaaatcttgcttcttgatcgaggatgaggatgaagagtctggtagttcgtctcgagaagcttcggatggcgggggagcaagtaggagaggggtagccgtggattatacaaagagaaagaaccataatgtcgagaaggcctcgactcggatcgatgaaaggcaacatcgaaggtctacacatcgttgccttccagactttgcactacatacgagcacccctcggtacctaccctatcacaccccgcgccagcccggtggacatgcccaaaatctctcgaaatcgtagacgcgtgccggaacctcgacccgtggtcttcctagagcattatcatcctaccaccacctcccgccctctcgactcgctctccctccacccggccgatctgctcgatctttcctcgctcgaactcgtaggacagacgccttgtttcacgaaacatcgagacgggtcgttggatgcgggcaacctctgcttgtacctccctggacctctggcggggctgctgaaaagtcgggtcgacctcgagcccggggggagcaaagacgagaaggagacgatcatcgatccggagctattattgctggatgtcgagatgccaaagacccccgtccccaagacgtatgatcgcgagctagacgtcgggcaaaaagtcgaactcgccgatgaggaaacgatacaacgtatgctcgttgacaagatcgtcggcgacgacgacgatcagtatatggtctctccaagcacgtccatcggagcagcgtcgtactgcctctatccggagagcccgacgaggacagtctctccttcaccctcgcccccactcttgaccgagtttgttccgcgcaaacggaatctggcccaattcatcgagtcgttgaaacggcctcgtcgtccgcgtcgggaaagagatcccaagcattggcctgattggcagaagatggccgagaggagagagaaaaatctggcatacttcagagtgtatgacaaagctcgacgagcggccaaggcgggtcaaaagtctgccccagattggggcccagatcccagcaacccgaacaagaaacgaaccgctagcagctctggctcgatcgccaagcgatcagaacgtgatacgagcaccgactcgaccttgacctctttgtccgattcgagttgtagtgccagccctgtgctcgagatacgatcgcgttcgagatattccgagtcgctaacgcctctacctgattctccttcttccccttctttcccctcgtcgtcccgactctgactcgcacggatctacgataatacccccgtacatcaacttgtaacaacagcaccgcccgctcctttggagatgattacaactcgaggcggtcgaaacgttgtcaagaagcaaatcattgaatccgattccgagcaagagccaaacgaggacgactttgaggattcgatctcaccggaccctgaacgcccatcaaatcgaaaaagcacacgggtgtccaggaaacccttgaatgggttcgtggagcccgacgacggagacctttcggaagattccaacgggcggcgcaaaaaggcgtcatcttcgtcgaacgcccatcgacgttcgactcgaaatttgagaaatcaatctaaacctccaaagaagcaggtcaaggacgacgactatgaagcgcatagcgatgacgaagacgaattggcggacgaactggccgaattgagagatgacacgccgcaatttaccgatcactcgagcgatgtcattccagccaccgcccgtcccagccgaggcaaggcgaatggccgaggccgaaaaacacttcagtcgacagacgacgaacaaccgacgaggaaactgagagagcggacgaatagacccaattatgggttcctcccgctgccacccgatgagcttcccggtcggagtcgagcaggcccgagcgggactagtggcttcaacgccggttcgcagtcaaatggaggcttcctgatggacatgacaagaggcgctggtgcgctagcagatcccaacatgcccaacatgccggattcggattcggtaggtcgttttctatacagtttgcgtcgcagacaccatctgatttggaacgtgatcgtaggacgatgaagcgccggattatatcaaagctctgcgcaaggaagcctcatccacggtcgctttggctaatggaggtgtcaaccggggcaagaagggcaatgccccggctgttgggcccagtactgcaacagttggagccggtacggttggacgttacaatcctgaagctggtaggtcgttgtgctcgtaagcgacctttccggatgcaacatcgctaatacatacatgtcatcagctcgagcagatgcggacccgctgggggtagatctcaacgtaacgttcgaccaggtcgggggtctcgatggccgtgagccttccttcagaagatgtactcgaacacgccattccggacgactgaccgggactgctttacagatatcaaccaattgaaagagatggtcgcattgccgctgttgtaccccgaactgtttcaacagttcggcataacaccaccgcgtggcgtgctgttccatggtccgcctggtacaggtgagtaccggctgactcttcaatctttatcaacgcaagctgacacggcgcaccgccatacaaaaggtaaaaccctgctggcaagagcgttggcggcgagttgtagctcgtcttcgcaaaagatcggtaagtcgagattggcggacggacgtttgcaacgatttcgcgacgctgatcacatcttttatagccttcttcatgcgaaaaggggcggactgtctcagcaagtgggttggagaggccgagcgacaactgcggttgcttttcgaggaagccaagaacgcacagcctagcattatctttttcgacgaaatcgatggtacgtccagccgtctgatcgaatgtcggtatggcactgatcatccctggataccgatttgcaggtctcgcaccggtgagaagctcaaagcaagatcaagtacattcttcccttgttgcgaccttgctagccttgatggatggaatggacggacgaggtaagcgatccgtctcggcgtcgtcagaccgttgactcgtgcttacgctaatgcacggccgcaggacaagtcatcgtgattggagctacaaacaggcccgactctgtcgatcccgcgttgcgtcgaccaggtcgattcgaccgagagttctactttcctttgccgaacagggaagcccgcaaaaaaatcattagcatcaacacacgcaagtggcagcctccgttggaggaacctttcttgaacgagctggctggtgtgacgaaaggttacggtggagcagatctgcgggtaagcttgaacggaactggtcaatggtcaaacgaaacttacttccgcttcgtcaggccctgtgtaccgaagccgccttgaacgctattcaacgacgataccctcaagtctacaagacgaacgatcggctgttgctcgaccctacatcaattcatgttcaagcccgcgattttatggcatcagtgaagagtgagtcaagtgatagcacatttgagaggatttttactgaaagcatctgcagagatcgtcccctcaagcgcaagatcggcttccagcagcgctcaacccatccctcctcacctcgagcctctccttctcgctcctttgcagcagatcactggcgtgctagacgggctcataccgaacaagaagactaagacggtactcgaagaggcggaatgggaggacgacaatgctgacggaacgtttggaaaggagctcatcatgcaatgtatgttcaagtctgcctgagacttcagtccgcaagactgaacgcatcgactccttcagcctttgaaactcttagggtctaccgaccacgactactgatacatgggaaaaagggcctcggacagcggttctatggagcggcgttacttcaccatctggaaggcttccatgtgcagaacatggacattgcgactttgttaggtcaatcgacggctgtaagttgacgaacctagcaccccgtagcttgagccatactgaacagaatcatatcttcagacaaccgagacgatgctggttcagatgtttgtcgaagccaagcgacatcaaccttctgtcctttatattcccgcactcactcaatggtccgccgtcctgacgccgacggctagagctacgttcgggaccctgctagacagcctgactccctctgagccggtcatcgtgatcgcattcatggatgagcccttggctgcgttggatgacgagatcaagtcatggttcggtcggatgggaaacaacctgatacaactgcgggctcccagcattgtaagtctttcagttgggaagtggtagatcagctattaaggtgccattgtgcgagcaggatcaaatcaaggcatactttcaggatatctttgaaaagatccgattgcctccagatcagttcccggacgcattacctaagcgtcggagagttctcgaggagttacctagagcggcacccttgcctcctccagctccgagcgctttggcattggctgaacaagcggtcaaggaccagaccttgaaggaaattgtagcgttccggctgaatccgatcttgaccgagctcaaaaagaggcacaaccgaaagtcgaccttgaccgcagcggaagctctacaccgctggcatcaacttgtcgcccgggatgaagcgcaagcagaggccgagaaggaagctgccagatcgagccgccttgatccggaagcttctttagcgctcgatgcggccatcaacggcgaagcggtccagccgatggtggttgatgggcctcaacccaacccttttgcagaggagacagagaaccttcccatcgaaataacggcttcggcgaccccgggtgcgatgggatcaacggaagttgcacctgtcgagcgaccgcgatcgccgtcgcctgtggtgaacaagccctctcgacccagacctcattgggtcgactttgagctgatgcaggaaaagctgatgagtcaagacgatggttactactcgttgaggactttcgagcgcgacatcttccgcatgagagagaacgtggatggcgccgagatggacctcgacaagcgaagtaaagcagctctaatggcaaaagaggctacgcttatgatcaaggatcatttccaggacgagcagcagaagctagagatcgagaggatggccgcgcgggagtatgccaagaagcagctgtcgaaaaagaagacgacgaagtcagcgaattcatctccaaacgggacgcgatcatctgctcgcttgagcggccgtgcacccgagatcagcttttctgaaatcatccaaaatgaaaaggccaacgggaagaagcgttctcgggacggctctgtggactctgcttcgatcacttcggacgcacgagcagccaagcggaatagggctggcgagtttaacagtgtcgtcgccccagtggatgagcaacacatattgcaaagcgctacctttgctgcttcacacggatcaagtacaggctcaggaactcatgccatggcggcgcccttccaagccgacgtactcgctgggcaattggagcaagcctcgacaatagcgcaaccttcttctgaaggcttggccgctattctgaatccggtgcagtcacgcccaagaagcacaacgcctctcgctgcgccggtttctcactatcaacaacctcctccgctgccccatcctgcgttctttgtgcccgagcgggagttgcagaccttgtcagactacctcgtcgtgggtaccagcgagggtttcaccatagaggatctcgaacaacttcattcgatggctctcaagatcatctggacctatcgttcggattgggataggtcgggaatgctacatcggctcgttcaacagtgctcgagcttcattgaaatggtgtaccgggggacgtaatctgaaaagatcacggaaatcatccaacataatgacctcattcatgctatcatggtcgaatcgttcgacgtgtatcgttatgctatgtactgtattttttgacgagctgggtccggcatcgccgaaaccctagaatgatgatgatgcaaccaaccctgtgttctagcttctccctttcactcttccagatcttctccggtttcgagtagactttccatgcgcagcccttgattatagtctttgagcttggagatgatatactccagtccttctccttcgagaattccttccagcccagttgtggtcaatcctatgcgatgatcggtcacccggtcttgaggaaagttgtaggtcctgaccttgtcgcttctgtccattcctttcacttgcaaccggcgggtatctcgacgatcctgtacggcttgagccatcttttggtcgagaagacgtgctcgtaggatctgccacgcccaggctttgttctagcgaagagcatagaacttagcgcccgaccgtgctggagggccttctgatcaccatctaaattgcttacctgatgctggcttcgagagtcctgcatcgagacactgataccggtaggaatgtgcgtcaaacgaacggctgattccgtcttgtttacgtgctgttacggacaatcggtcgtcagcgatgatcgatccaagccgtaacaaaagagatctacctggcctcccgctccgcgggctcgcatgacttctgtcttgacgtctttctcatcgatcaagtcatcggaggaagtctcattgttgttctctgataaaggtagcacctgagacgagaggcatcagcatagcgctacgtgctatggcgtattcacagagaaacactcaccaccactgctatcgtactagtgtggactctgcctgcagattctgtcgctgggacccgctgcacgcgatgaactcctcgttcaaagcggaaatcgccgaatgcgccttcgcccttgatctctagggtgacgtccttcagcccgttcccgcccacgttaccagcggtcttgctcagaatcgatgtccgccagtttcgctctgcagcgtatcgcatatacatccgcatgacttcctccacgaataacgacgcctcgtcgccacctgcgcccgccttgatctccagaatcgctgaaagctgagccgattgcgaagccggcaacaataaagacggcaactgcgtctcgcagagttcggtcaagcgctctctcagggaagtgatctcatcctctgccagggccttcatgtcggggtcattgtcgcgcaggagtgtctccgcctcttgccaagcctggattatcaacggtgacagagagtattcgtgtatcatatgtaaacaagaagggtatgggggtcagaaaggggcaggggacagagctatcaaatacagttatgggcgaacctcgatggcttcgttgtactcggcccaggctgcggctaggggttctgcatccttgatggttcgggcgaggtggatttgttcggatacttcctgttcggcgccagacgattgctgtaaaggatggaataggaatcaggtgaagctacgctgaaggatacacatcgtttctgacgcaccgccttcaatgcctcctcatagacggcgaccttgtgagtgatgagcttgtacatttgctcgttaactttgacggtcgcatcctgcgaagcagcagacgtcgagaacgatcgacctagaccgacccggcagacaatgggaattggaacaggcgtatcccgacaaaggcagacggtatgaaatccgcgccgttgatcgtcaggcgagatgggctcttggccgatgaccttttgagccttacgctctccagcagcctcacttgcatccatctcctccgtattgccacctttgccgtgcttgcgagacgtctccttcttcctcgcttgtcgttccatatcggcagcctcgtcgatcgtatcatccacgtcgatcttccggccatcgtccgttttgacaaagaccgaagtgacagtctccttcttttcgctgtccttgtctccgggtgccgcattcccggactgtctcttctccttgacctctacctcgacgtcttccaggtcctgtagctgacccttccagtcgtaatcgtaatcggccgcgatcttggtcatctctcttcgaagagccttagcctcggcgactgccagaatacctctttcagcaggcacctccatgttgccacgttcagagcaaactgacctagctcggtccatcgttcgacgtctagactctgtttctggtacaactcttgctgtttcgcagaaaccgacagatcgaggacagacgagtatgagactgtttcccaagaaatggagagatgtggttcagctcgatgaaatcgaacgtaacactgcctgttatttcggacgaaccttcccgttgatgctgtaacccggtagatggcagatgtcccacgaatcagcctatgtacacggctcgagcgatgacgccacgtagactcacgtagaggaagaaaaggtaccctccaatgaccgtcgtcagaccgctgagataagtcacctagaacacccggtccagtcagataagctgaccgctatattgtgacagacggcagaagaacatacaggttccatgacgtcctgcgattacagccaaggagttagcaatggtacgttagctccacacgccttgactgagcgcgcgatgctcacccatcccagcggagagaagaacgctacatcaaccagaagtatgatcaactgatccatcatttatccatagcggatagtgttagcgggaaatgacgtactgagcttgaagacgactccccagtacgctaccagaccgcctagtcccaagaccgagtaccttctcgccgcacgatgagcttccttgtccagcctgtcacaatagttcaacctcagtcatggtttctagctgggcaggttgaaatcgacgccgaaggaggcaagacgtaccattttttctgctccgtcatcttcgcaatctcggtggtcaacttcaacagtcttcgtcggaggtagaccgtcctgctcgcgaaagtcgggatctggaccttaagcgtcaagggggataggctcgagctcgactgtctttgggttgggctgcgtgtggcctctccatcgtctcccgccgcggtcaaggtatctgcgcggaccacctcttcgggtctgaccacgatcttgaacgactgcgccaaggtactctgtttgatgaaatcccctagatccgtcgaggtggaccagcggacctcttgcaagtcctgtccgccgggtttcctatcgttcaagatcggtccaccttcctcgccgacggtctctgcggtctcactcgaaccggtcgaggtggctgatgggtaggcgtcgtggtccctcccgctgacagctcggaattcgacctcggcagaacgttcagacgaagggagtgatccgaggatgagacgggagacgtggctcaggggttgagaggggtgcaagaggtaagccgtctcgaccactttcggttgagactccgttgtgttcccagctgcatctgtggttccaacttgggatgcgttcgatctgctggtactgtccttggccaactccgctagtgatcgaggtaagggcaggacgagcttgaacaggtgactcgtcgtcggtgtcaacttgcccgtccacctggaggtatcctcttgtcggctcagctcctctgcccgcttcttgacgtcctttttcgtctgatcatccttttctacgtcgacctgaggtttgtcacctgctcgtgacaggagttccgagtgttgtacgtcgacaaacgaagaggtcgagttgaacctagtggtggaggtcgcgtgcgggaatgacctcgatgtgcgtgccagacatgagatcgatgggtgtgtgcgtgcgatcgacctagtacccgcaaacagcgagcgaggcagcggcatggggtgatttaatgaagctgtagctcgggcttgtagccagtgataagggtcagaaagacgagtctacaggtgatgatataggttgaagctatccacacaacctctctgtcatcctccatccatcgaaagccgcgcgatcatcatcatcatagcatcatcgttccaaagtttgaatcgatcaaaggcgacgcggatcaaactcaacagcaggtagcagcaactgggtgtaacagaggtcaatctcgctcgagtatcacgtttcataggtcatcaacggagacgtccatgcctaccgctgttcctctctctctctccgtgaccctcttgctgagaggcgacttcatgatgtctcgcattgactgggtcgattctcacctttaaagcgacgcccagagacccattgcgccagccccagcaggccggctactctatatgaaacgacgtgcgcctttccaacgctcccgaacgcgaggaggatcagcagtctgacaaacatcctttgtattctcccctcgagcggacatggtcatcagtgatcaagcaccatatgttggcgctcgacggttggatgatatataacgcctgcgcttgaagggggcgcgaagggcgagaccactttgaagcaggcgatttccatcaaacgcactcagccccttcccggatcccccttcgaccattcgtcagaaaccccaacccattcgccatgcttcccacccgtcagatcactgcgtctgcaacttcccctttcatcaccacctcgtctgcaccttattctgcattccgtttggaccgggcgacatcttcgacccgtcctcgaagcgcctctggtagcgatcagtccagctccagcccttcccctcctccacatcaaatccactctcctcagaagtccagtccgaggacctcggccgtgatgaatcaccggacaaccccttccggatccgaccttgaagcgatcaagctcgtcgggttccaaaagggacatcgaaggatgaggagcaagaagcttcaagccaagttggccaacaatgcgctgtgtcacgggttcgaggagaacgtggccgcttgtatcttgatcgaattgaggtgagccatggcttgctcagcaatggctgccgagtggaaagaggagagactggtctgatgatctttgcctggctcgtgatcgatagtcgatcggcaccgcctgtcacgccacactacaagattagcaaagcggggacccaggttcacgagaagtagatggtgcggttatacttgcagtacgatccataagctggacaaagcacaatcgttagcgaaagagacgtggaaacggggtgaatgagaacaatattgtatcgcgtacacggcacctctcggcctgtcctagctttagtcgatcgtcaaggtggtcttgtcttcaacgatgaggaagattgtggatcgaaaattaaaagtattatatctcgcaggcgtgtcgatgataatctagtacatgatacgatcacatcgtgtgttttgaagcgagcgagagagagggagagagagagatggcgcaatataaagagataaaggcggaccatagaggtcgatcgaaaaacacaaagaggtatatagaacgagaagggtggaagaaaggtcgaagtccgttggacccgatgatgccggaaaactagtagctacattgtgttgaagaagaggaaaggtatccagaataccataccgcgaggcggtgtcggtagggaagggtgccgtcgtatatatcggcgatgatgatgatggaggcgtcgagatctggaccagccagtgtcgtgatacgagtcgaggaacgaatcgccagcagttctactgctggacgatgacaacctcttctccgttatcagtcacagtcctgatccgcctggtgaccggctccggatccgtgttgacaccgttggcgttgtgatgattaccggccaacaggttcctgagcccggtaaaactcattgacgacctcaggctgagcgacggtctcgattgagtgcccacgttgccggtgacgacgagctgaggtacctggtgagtcgacttgtgttgggcgtactcgatagcggcagactcgttcaagagcttttgctgctgcttgcgagtagccgaggtcaacgaggacattggctcgggactttcgatcaccatgtccgcgacgttgacacggtgtgaccggtggtgatgggcctgctgcttcgatcggtggtaggcctgcgaaggaggctggtagtaccgagcgacgttttggtcgtcacgctgacggacatgagcccgctcaacagagctcaggccataggtgctaggcagattccgagacggtgtggtcgagtacctcggagaaggggagccaggtccgtaggaatctcttttgtaagagggtgcctctgtcgacacgtggtgtccagcgacgaccgcacggacgggatcgtacttgccctgactagcagaggcaaccctggacgagatggcgccgacccggccctgagcggtagccctggctctgaggacgagatcctcattggcctggcaaggttcagcgagcaaatcgtcggtcgaatcgtccgaggacgtcgagccagaggaatctcgtcgttggagagatggtggggagatgatggtaggtactcgtaggcacggagcggtcgatgacgaggatcctgatgacaatgttggtaccgcgctcgatgtcctcgctcgcctctcgggcgtgaggtagacgggtcgggaggaagaagcaggagcgttgcgtacgggcgaggcgagtcgggtctgagagagtgcatcggtgaccatggctacaggggtggaagtcgagccggaggcttgtacctcttctctagacctatccacaccggccgagacgggggtgatgggtggcgttgggagccctcggtgcgaccccacgttctgcaagtttaaacggctaggcctcttgtccatcgaccttcgaggagtgaccgggacggcaaccgcaactttggacgatgaaggtccggtcgatcgggagaccatgaacctggacaagccctcgatgagctcgtcttcctcgacccggaggttgtagtccaagaggaacaagagttgcttctccatgaggttgacctcggggagggcaaagtggtgaccgtacttttgccagtgcttgttcttgggggacgagtcgttcaggtacttggcagcgcagatgagggcggcgaggaagaccctgtgtcgggtacaaggcatccccttggcgaccttgggaagcttgagtcgcagcctctcgagatagatgacggtgctcatcaacgtaggcacctggacgttgctctgctgcaccaaaccccggataaagtcgaacagggtgggcagaccgagagcgacggcagctcgctcgatagggtcgttggtgtagtcgaacgcagacgaggcgaacgaaccggccttggtaggggtggcaggaggcgtcatcgatccagatgcatcggcctcgacattgatgacgctcgaagtcttctccaccaggaaggctagtagggacagaaggggatcgtaagcacggggtggatagtattgaattacccctatctcggtactcaccgatcatctcgtccgagactcggctcctcatgagaccgcagaactcggggtcatgcttgcttcgaggcaccatgctggcagggtggatccggtcgatgaccgtgtgggaagtagaggtggccattatgaaaggtagatgttagatatggggaagagtaggagggtaggactaggtgagtagcaagaagagaggtcgagggtatccttgctgatcggcctgatgcacgatccgggctgaaagttatcgagcctggggatgtgtgagggcgaacgaacgaaagacgggcacgtcgatcgatatccttctataactaactggcagacactctgataagatcaacgatgcggatcggccgaaggcaggtgatcagtctgagttccgggcggtgggatcagattcattccccgatagggagaactcacccgcaatcgcaaaagtggagggcgagctagtgtcgaatattagtccctttcgacagggagtcgattcgatccgtccccaagtgaatagagatagagggagaaggattcagacggaaggagaatgatatgttgctaggacgaggggagtagaatcgaaataggtgtcgtggtctgaaaaggtgtgttgaagttcggcggtcttgagatcagcgaacgggaggtggctcgcagagtcgaggatcggtggggtgatatatcaaacaagaggtgatccgagttggggcggtggtggtggtgggggggagtgaaatgaacgtcgatcttttgtgtagaaggagagtggagctggtacaaggcgacacagaacgaagagagaagaagcaagacgagatgagtgggaaggtggggtgggagactgagcgagatatgaagagattgtcagggcaggtcctcgatgaatagacaggacagtacaatcaatcgataaacgaccgaagccgacgcagcgcgggccaagcgagagggcgggagagatacggaacggcacgaggctcagggagaagaagaagaagaagaagatggcatcccggtctctggccccccttgtcgtcccgccatcccccccgctcgcgcgctcgacgccaccgaaaatccacctgtctccctcatcattcgcggccccggctcatcgtacctcgcggatctcgcgctacggtactggaagaaaaagaaccagtccgggcgaaaagaaggatggcgtcgcccgtacgttgccgggatagggtaggcacaaacgcaatttcttgatccatcgttcccggaccctgtctcaggaccgacatcacaaggacaagagagatccttggatcgtgagccagccgcctgcttggtctgccgctcgtggaacctccgcttctttctcctccggattgtgaaacgtgaggcatcgggaaaagatctgcagaatcgacgcactactcgttgtcatcatttcattggaacccgcaccatacaatcgagatggggatcgcattcttcgttcggtggaatcggcagatcggcggcaggatgacaagttaaatcgacgggtatcgtcctcagcatctatcatcctcgatccacattctgctgacagattacgattagcctcccggtacatcgctagtccagctgattggcggcaaagcatcatcaacgccagctttgcatgccgcagccgcacgccacctcgacacgagatatgacgatatggatcgatcgatgtttcgtccatgatcttccgacgaggatggctcgcctgataagatccctacttctcccgaaactaacgaccattccccataggtttcccagccaggtttcgtctcgcacttcctgaaagccacgtcgtaccacctctgggcggcatgacgctgtggaaacctctcgatcgactgcgatccgtacctttacctctgaaccaacgacgatctcttccggtccggtaacaacctcgactgtttgtaccggagcgcgacgctctcgtcggtgtcaaatcccgtgtcgagccttcctgagttttgaaacagcaagaaaagcctctccggccacgtacgtatctgatggaatacgatgtgaaagtggtaccgcatggccccggtatcccatactcggatgtaacacggagtgcgagatccaccagatctgccttgtcgccagtctctgacctgttttgcgtcgacaatgggccacgtacaaagaggcgtagggagggaaactttatcgcgtcgacccgccatctcatatcgaacgacgacgtgtttttacacgttcggtgcttttgggcggttgctattgtctttcttcgcttctccagatcgacaacagaggtgacgagtatggctgggttgcgccaagaagtggctttctgttggtcgagtcgattctcatgacgacgatctttcgtaccaagttttcaagtgagaaatgcagatcgtccaactgaacagtgacgatccaatcgcgcgcgtctccgatcccgatcgactagactcgattccttcgcttggactcgatatcactcggctcgtcgcacacactccttcgcgggcgttgaaagcatcggaacttctgaagaagcatcttgttgagatatcctgaagaggtattcttatgaaagatgtagaggctcgggcaaagctgtgcctctcgcaggcaatcgacctctatgttcccctccggttcctcgcacatcaccctccgtagtctcactgcaatacatacagttacaaaggacgggctcggtagggatctattgacattccaagatagctctcggcacgacactagcgcacatatcataggacctccatcctcacatggcggcaacaatcaagctgcgttgatcatcctgttccttctgatcagccgcgagcaaaagttccccctctgggcgagaatctgcctcaaccaaacaacgatgccggatgtagatcttcaaatgctcggcggtatttgggcgagaagattcgcgtgagaaacaaggaaatgcaccggcttgctagcgcgctcgttgcagcttctaccggttccggcgaagaggtagacaggcaccgccccgatcgggacgggatcgccgaaagccgacgtcgatccgttttgaacgctacgggccgatcccgatattgccagatcgaaaacgcttgcaagatgaaacccttgaccgttctgcgcttgaaactgctaagcgcaacgtgcggtcagtaaacgcaacgccgtcgcgctcgacgtcatcctcgtcaacgatcggttgtgaggccaggcccaaagtgccacgagcccttatcgaggtcccggttgcgcgcaccgcggttcgaccgagtgggacctgacctacctggaccatctcgtaattcgcgcttttgccgccggtttcacgggcgacaatgggactcatcagcccggcgacatgactcaccatccgagcagagtttcccccccagcccgctccacgaaaccaaagctctgacgtcgatcgaaaaggagaattccaatgactaccccggtcgtacgacgagtaatagtcgtcactggccctctggcccccactggctggctacggctcttcggggagaggtttatcagtgaaatcccacagagtcatctcccgcgggttgagcgtcatcgacgggagtgtcgtcgtgggattctcgggtagaaggcatgacacagatgttataccgacggatagaagatgcattgatgaataagggcaataacaacctcgggaccgagtgatggtcaacaacactctgaatcaccaaagaccgtcgtcggaaagtacatcctctatgtaacgataagctaatgaaaaagaaaatgatctcgtgaccatggagaataaaggcgctagtcgtaaaaggtcgtcgtagaaaccgtccaggtcgtcatcgtgtcgattcgctggcgttccggcgtgataggggatcgacctagtagaccgaagtacccctcttggaccatcgagcggcgacgacgtccctcttggaccaagaaatgctcgacttgcagctcgaagcctgggtctcgcactggccctgaatagtctgtttaaggcaaaacgcggggtgtgagacttttgaaagggtcgtgattcgtatggacaagctcgaggacttacgctggtctgaccgtactgagagttggcgtagtcgtaacaagcgttctatcgagagccagggtgctgatgagcgctgagaaaccattgccgtcaggctctggcgccgactcaccctctgctcgtcacaagacctgtagagagcgtcctgcaagaagttgaaggtgttgctgccagtcttgtacttttcgccagattctacgagtagacataggagaatgcgtcttagtggaaggtatcagtaccaaaaatgtcaaggtagactgacggtagacaccgggagcggctcctccaatggttccagtggcggtttgcaagttggcaccgtcggctccgccggtaggagcgggggcggcaacgctgaatggggtgcaaagggtaatatcgtcaggttgtgcttcttttcttcacaaggtatgagcatcgctgctggacatacctggactcggcaggaacagaggccgaaggagcagggtactcgggctcagcgacagaggaagtctcttcaggagcggggtaaccgggctcgaagccggtagaggtttcagtagggacggaggcgtctgaagtgggaacagcgacgtccgaagtctcagtaggagtagcgacgtccgaggtagggacggcgacatcggagctctcggtaggaactgcgacgtccgaggtggcagggtactcgtcggtcgaggtggtgggaacgtcggcggtagtggtagcaggaacctcggattcggcggtggtggtcggcacaggagcgggcgcaggggcaccaccagcgttgtagacgggaggtccaggagcgacaaaggcggcatcgtcacctccgtagatgctgtgcgacaagtagtcggtgttcatctggtacgcgtcggggaacttgacggtctcggtaggcttgacggttccggacgagatcaagttggcctggaagcagtaagggtagacctgaggtgcattgggagtgtgcatggctaccagatcgagatacgtcagtacactatcgagaatcgatgagaagagtctatcgctactgacccaagatgtcgtgactatccgattcaagtggtggaaagatagaatcagtactgcaaaaggggacaaacgctggtcgaccgaccgctcaccgaatcaaaacctttctatcgaaccaaaggacgatgcgctgttagcgaagacctttgacaagcacacacacagtcgacccgaagaccaactcacccggcagcgagctcggcagggatgttgaaggtccacttgagagtatcagcgatactcttactggcccagacaccgccctcaaagccatcttcctggatcttgaaccagttgagggaatcggcggcgactccgtcacaggtctctccacagtaggccatgtactcggtgacgggacctgcgtggatgtgaacgagtgatggtcaaggtcagttacgattgcataagctcgggataagtctgcgaggtgtacgcaccgagatgggacctggcgcgaagtgaaggcgagcacgaatgtcaaagaatcgcatcagcatcccacgatcatgatcgacagcatagctcgaccgagccggacttactggggccaagtgtcccaagtgacggtgacatcagacccagcgttgatgtcccaagtctcgagacctttaccggcatcaggacctccacaagcgacgatcccgctggtgtaatcggtgaaacctgctcgttcatcggtcacgtcgcgcgttcatcgtcagttcctaatccaatcacaaacgggtgtcacctcactgcaaggaaaactcgcaactcaccctggtccgaattgatcgagggtcgttgggcggtgataccattgttgtaggctttgccgttagaggggttccaaccaaagtgacctgcaccgtcaaaagtccagtccttggtgtgtccgtgagcggagaccagggggagggcgatggcgagagccgagaggagggcggcgatcttggactagagggttcgtgaggtccgacgtggtgaaaggagggatcgacgagaggtgcccagtaaggtaagaggagagaagcgaaaggaaggggagattcggttccggttagtcatttgtcgttcccaaacacaaaggaatgctttccccggtcgagactcactcgagcgatagccattgtggaggatagttcggtcttgaatgaaggtctactacgatcgatgcgactggcgcgaagtataaaagtctagcttgtgaaagaaagtggtagtcgattgaagtcggatgaggttcgagtgaagtcaattcacgttcgagtcgagagagggagagagaaagagtcttttgcgtgatgaaaaagaaagttgaaggagtggtcgggcagtgcaaaggggatggaggagggtgggtatatatatgtttctaaacagctcaccctcctagcaaaaggtgcgcgagcagtggtggcgaaacgagcgcggtcagtcagcgacgacattcgacgtggccaagatcggtcgtcgtcaaaggaatctttccatcgtcgtcgtcgtcgtcgtctcatcacattcggttgaaacagacgacgttctccccttgtccctggtcgtgctgctctgaaccttccctgattgaatctcgatcctgtcgttgtccttctgatgaaccagtgttgtcacgcgatgaaacgtgtgaaaaagggtaaaataggtttcgccgaaaggaagctggacgcgcgggaaggagcagcatcccgggagtctggcttcccgtggccctcctttatccggtccggtcctgtcttaagactcctctctttcctccctttccagtgcttggcccgtagctcacgtttcattcgactgcgaaactaccgtgatcccgccctcctttcgagtgttacggagggtacttgtccatcagatgtgcagtgtcatgacttttgatgtttacgagcttacaactcgatgaaactcgtcggacgtgagtctcagcttggcgacgaccagatccccaaccggtcattgtcactccaagtgatcggtgccagtcgtcaagcagcaagcgagttgagcgagcacattggtcaaggcatgttgatgacggatttgaccgatcaatcgatcgatcgggacgtgaccagcctcacgttcgtttgaccgagtgtcgcaacccacgatcgaccttggcagctcgtaacatctcaaggtccgttccgaaaccggtctcatccctgacattcaaaggcaactcgcactacgagagaaagacggggtttctgctgatccgatcagttgccagttgatcctccgcttcaacaacctcgcggcgcccgaagctgaaccgatggatctaccgattcaaacccgaagaacgtttcgcgcgggcatcacgtgatcagactcaccgttcgatggctcgatcgctgtaaccagccaatatgcctcggatggcggtcctctgtatctacagacatccatcggtctcggtcttgcacaaccttgtatatcacagcgagtctatcagacgtgcggattacattggagcccgcttctcatgtctgcctgtaacctggcggcatccggtatccttgtacacgccgccggcagccaggcatatcgaactctaaacgcataagagttcctgtccttttgcttacctttactggtccacaccgagtcgtcgagtggtactgggaaagtaatctcccttgctctcggtcagtgacttcgacgagatcatatcgaaggcgatgagggtcgacctcggcccactggcgctggcgtcatcagaatcaccggcgatcttaaaccacctcctcgggcctcttctcaagttctgctatgcttgctagctcttctgtatagagtgatattggtcactctgtaacgacttgactcgacttgactttgtgggatcgccacccctgtacccttcgatctgattccgatcggaagcaaactccgaatctcgttcaaccgggatatgcgcaagttcgaataggggctgttctcgactttatcatcatggtaacacgtccaccgcagctcggagattagcagtagcattcggtctgtgtgcgactaatcgacgggtcacaagggccgttgtcacgcctggccggtcccggtttcgtcgatatagagctccgtcgtaccggaacatcacccgtgcaccatgaaccataaccgagattcgaccgtctcgagcatcgtcgacctatacggagccgaggcgccgacgacggattctcatgaccgggaacgatacccagatatccaggaggaagatggtggtgatcgtatcggcggagtgacacggttcgaacatgatcaggatgttcaaatgcatacgggtagctcgccgaccgatttacctgctctccgagatccaacgttggccggaccggacccatcacacgaacctccgcaacagacgctccacccttcccgctcggctctgacatctggtagctcttaccagccatcgagtcatctccgagaacaatcgagcgcgagtgcgagctcgagcttccgagcggcacccgggtcgagcacccagaacgggcggttcgggaacggcaggatagggctcaacggggcgtacaatgaatcggcagcatcgttcgcatcggttcaacagcccggagaagaagatgacgcttatcacgttcgatcgacatgtgagagatctggtctgtctgcattcgctcggtcaaagctgagcctctcatataccgtttgtcagatgctcgattggaggtacaaggtgtttatggagacggatgggatgagggtgtggagcgtactagggagagggcgatcatgaaacgtcggacgagcgatcctcccgctcaacgcggagatgggctcggtgagaatgaacgtcaggctctggcaagggtggacaggtgagtcgggtatcgggaggagtacatgtcaagactctcaactaagcctggacggtacgacggaaccttgcaggtatggctttttcgatcaagcgatgaaggcacgtcaagaatcccggctctctctcctccctgccaagccgttcaaatccgtacccaagctccccaagacgaaacctaaatccctatcccaaccgtctgctggaccctcgacaagtcaagcggaggaagcaccgaatctgcctttgtcgatcgtcgagaagttgtcggcggacgctgtcgtacgagcaaaagtcaaggaaaaggagcgggtcagcaagtgggagcggatgttacgggtaggagaaagggacgggggaatgaacgtcagtcggtggacgtgggagcaggatcgcaagggtcaaaaggtgaataaccacctcgtcttttctcattgccaggagcggacgattgatatgttgcctcgactactagctgccggagcgggtgtacaagggcattcctgaccgatggagggcggcggcttgggcggcgatggcagagatgcgggccggacgaggcggaccttcttccccaaagatggctcgtttggatgagacatatcgggtcagtcgtcgagggagattcatagtcatgtgactcattggctgatactctctcgcacgagcttagaaaacactcgacgcatcgtcgagctacgatgtccagatcgatctcgacgtcccgaggacgataagcggtcacatcctgttccacacgagatacggtcacgggcaagtcttgtggaatcgaatgggtcgcaaacttcagaaactgatcgcaatcacgttcccagccagcgctcacttttccacgtactgcattgtttctcaatgtactgctcggaatgtgggtattgccagggaatgggacccatagcggcgactctgttgagctatttcgatgcgccagtgagcagtcttactttcatgtcacttgtcgtcccggtcaactgaactgagcctatgacagcgcgtctacgcgatgatggtacggatacacgacgtgtatcgcatgcacagcatcttcatacacgggttcccgggtctgctcgaatgcttttacgtccaagagaggttgatagagagcttgatgccggacgtatacgtctcaatggtgaggagcaggaaaaagcaaacgcatggcagacaggcgctgaccagggaagcacaattttgcagcgggataatatgatttcgtcttcatcctacgctacgaaatggtatatcacgcttttcgccaacacggtcccctaccagacgcagttacgaatatgggacgctttcttcctcgacgggttggacgctcttgtcatggcgtccgtcgggattatctgggcccatcgcgccagcataggtacaccaaaagccaatttcgagactatcctttcgagtctgtcgtctttctacatccccgaagacgaagacgcgttctcgcggtggatgagaaagatgctgaatcaaaacaatatgcggaatcgtctagacggctggcgaaaagactggcaaggtctcgttcaacgcaaggaagacggcaaggcattattgtaacgattttacggcatatgcttatcacatgttggaagcacattattgaagacagactgttctgacgaaagaccactatgctgacgttcttgtgtacaatcaccacgtataaccggtcgcaaccgcaggtcaagctgaagagccttgaaaacgatgctgaattgtcggggaaagccccagggacgtacgccatatatgctcatgccttccttttctgcttgggggacggcttgatcttcttcggtttttcgaaatcatcatccgactcgacctcttcagctcgtctcttggccgctttggttttcttgaaagtcttttcagccgttgcaacgcgaccggacttgcgcttcagtgtactggcttggggagcatcgtaatcgtcgtcttctgggttcgaatgcaaagcgtttttcgggtcaggcgctctggatgtacctgcacgacgagccatgtcacgagtatcctgtctcggtttcgacgaggatggcatgtccgttgaacccttggcgttcccctttcgttcgagcatccatgggggaagaccttgcatcccgccactggtatcgatgtggttgatgggcccctgagggaatgaagtggtatgcggttggtagcctgaagagagactggtggtctgcagtagaggattggaatcttgttggtgcagatcaggaatttgctggtccttttggtagacgtggactttgccgttcgaatcgacgaaaacgttcatgtcatcgatctcgtgaatgcgtcgaaggatcttggcgtttccagatatctcgaccggcataggagcaccttgtctgagggtttctggcctgctctcaacggatgcatcaagcgacactgtgaagatacggtgcgtaaggaaacagatctcggttttggatactgtcccgcagacttacattgtgaatccgactgttccctttgtccttcctctgccttcttttccgacatcaagcccatcgcctctacatccattagccctcgtaatcccgtttctagcctttgcctcaactcatgctcgtattcgtctagcgcccgttcgttccgcatatgatattcaacgatcttcttgtcgaggtcacggtattgctcgagaatgacggtcaagggagtcgacaagtagggagatgaagtcatttgaccggtctgggagtcttgcacggtgagattagctcgaaagacatccttcaatcgcgtttgaggtgggaggctgagaagccactggctcaagccctgttcacaagcgcgaagcagggatcagcatcccgttcttgttttgtccggcctatgagcgctcacctcgtagaacacttctgaactctgcctcatcaaatccctcaatcccaactgatagtgcttcaacagtgcatactccttcacaattccaccaccacactctttccaagcagctccacacagcttggcgatgcttctttcttccgagctagtctcttctgctctcgatcgaggcacggtcgatcgctccgtcccggccgtacggtcagagcgagctgaatggggctgttcaagtgggtgattggacgtgttcgtaatgtcgtgattcacggaggatatgctatgcaaaggttggaccggcgcatgtcccggattctgtggctccatcgggtgaatcgttctctcgtagaggtcgggcggagaggtcatgtagacgcttgcattttgcaaccggagtggagtagcttgaacgggcaattgggaaatagtctgtgttgggtaagaagagtagaagttctggagttgttggggcgttgcagatgggtttggtaacgagttggtgacgaatacttgagatccactaatggtggtgccaatgctaccggagccgccgctccaagcttgcggatgagaggtcgttgctgtcgcattagggatgaggccttgctggacgagcacgaatgggcgctgaactggagtgagcgattgagcttgaggaatgtattgatgttgatattgcgattgctgtaacgtatgtggtcgatgagacaggtactgatactgtgtttgctgttggtccgccgagttcttccgaggaacttgtctcgtggttcgttggatagtgttctgtggggcacccgtgacctgtcgatggacatgtcgctcctcctggtgaagctgagtaacgctagcatgcacattcggacgagtgactgattgaccagacacagactgattggcatgaacattcggttgagcggagttctttgccgtgtatgaagatctggccgatgcttgcgaactatcggtcgttccttgtgtagcagacccagcggcaaagtagctcgccatcaaaccgtagtcggatctagctgctggagtagccacctgtcgttccaactctagctgttgctccggtcctgagattacgttcatgtattgtttagctgtatcgatgaggctttcttcctctcgcgtcaacacggtggattgtctattgagagacggggcaaggtgggattgtgtgtcctgcaccggagtttgcgacgagtatgatgcgttggtgtaggcatttctggcgcttggttggggatatcgggtgttctcggatgtggtagcaaattccggtgcgttcggttgagaaggagcgtcatgcgaagaggtatcggggcccatgatcaagctgagggcattcccagccgacttcatcgaaactgcatgatcggagtgatgaatcaagtgcccggtagacattcgcggcgcattcggctcggatctggtgccactcgagacgactctaggagacgtccctggtagctgcctttcgaaagtcgcaggagcggttgattgaggaggggtctggagcggcaaagtccgatgatcgagaagcaccttgtcgcatctgggtgatcccgaccgggatctgggtgtcggtggaaaggtatggcgagggtatcgaatgggttcatgctgaggctcagttgacatgttaacggaagtagcaggatccagtctagtctccagaaggttcggaatctgcgagaccgacggcgatccaggcatcaatagcggatcgcggtcccgctcagagaaggattaatcaccatgaactcttggtctagctggtcgatgccatccatcttgtagtcgatactaagcgaaaggatggcttcttatgtcgaagatccagaagtatgtggtatggtacactcttgaggatgatctatccggagagatctgggcagagggtttcgcgtcagcgttgtttgtgatggcttgcgacacgcagccttgcggccccggccactcacttctggcttagtgtaacggatctaagctccacaaagctgctttcccgagccttccgagtcagttccagactcctcagctcagttctaggtcggtaaaggatgaggaaaaggttgcatatcgattgatctatatcctcggaaattgatggcaattcgacagttcgagcttctcaagtcgatttgcatccggcaaaccaccgccaggcgccgagtgaaacgttaagagcgtgggttttcacagcgagtgaagctcgcgatcgtcgaccgtataccagcaagggcatacggattgtagaagtgggattgaaaaggctggaagataatgacgatacaggagtcctaacgatgtgctctaatgatagtcgcaagtaaaacgaaaggtgtcgggcgtgaaaagcatccgagcgcaacacctaaaaacaaaaacaaaaaagggggtaaaagtccacaaataaagtggtgtaaagaaattcgaactcggcatcagggcataatacacggagcgcactagtaaaaggcgagtgcgttatacgtttgcatcgaaccctgccgataattgccattttttgctcctattcataatgacatcaaacacatctctcccaccggtccagaaacggaaccagtacccgcaactgcatcacttgataacatgaatataacccacagcgaggcgagcaaggaacgtatgggcagtacaacccatccgccaggtctcacagatggcatctgaacggcaatcttgagccctctcgccacgagtcatcccgcgacaaatgccgttcatagctatgagttgtactatagcatgtcgttcaacggactaggctacacaagtctgccactttacaacacgagacacgccccgacctttacattgtattataagctcaaacgccaaacagttcctttaaaagctcctgtggagtgccccgtttctcaggtacgggatcgaccatccgcttcaatacccgccagaccacctcttccaccctatccagcccgttcagatgcatcatggctggcgttccgtccgagtagggttcgatgggcgggatcgatatcgtcgagggcatggcctgatcgttcttgcccagcgagtttgataaacgggtgtcgatcctgagtgatttcgccctcgccctcttgtccggcccatcgtccccctgtcctgagccttgcgtctgaacgcgggaagccagagagaatagatcccttgccgtgtcctgctcatcgggacgactgcacgcgacgttcgggtgagagccgttcagcgggtttgtgtcgggtgcaacgagcaacagctcgctcgaactcatcctcggcaacttgggcctttcgagggttttccgatcagagaggacggattccctgagactgcccgtacgtcgaattccttcggcggcgtgggtgaaatgacccatcatccgtggcggaggtgaagtgatgggcacggtcgtcctcgtcgaccctggcgtcgtgggcgtgacgggcaagacgacctgtccgacccgcatcaccctcgccctctcttcccactcccagaacctgccctttctgacgttccacatgagttcgatcgaccggaccccacggaagggttcgctgcccgtgatcaacgagtacatggtggctccaaaggaaaagacgtcactggcgtagccaaacgtgcgggtcgggcacgggtccaccatctcgggtgacgaatacggtggggtacctctcccgatcccatccgtcggcaaatcgtcgtcgtcgcgcacgatcacgctcgacgagaaatccgcgacgaccaagttgagctcgtcatcgaggagcaagttggccggtttgacgtcgcagtggatcaccccatgatgacgaacccgatcgagtgccaagagtccttgtcccatccatctcgtccacagctcgacgtctaccctctccgggaaccgtttagtgaacgcctcgacggtgcctcccgggatatactcgacgacgagcatcggacgagcaagatctcgccctatgctcctcctcgtgctcgtcctggtatccttggcgccggtgacggcgatcatggcagcgcgttcgacgagcctgctatcgctcacgctcctcctctcctcttccctctgtacaatacgtcctggtaacccctttcctagcccatcgatccccttggccccgggcggtcgactcgtggtggcaagcggagatcccggtccgagggcgtacggcccgttccataatccagcacccctgagcgtctcctcgagatcattgtccagctcgacctcgtcctcggtgaccagtcctaatctccttacgaccttgccgtcactaccagccctgacgcctcgctctctctctcgctctcgatctcgctctcgatcgaccgatggactcgtcagcagactgagcacctcggattccttttcagccatttcccacccctcttcatccccattgaaaaccttgacggcgcaaatattccatcccgtgcgtgtcatccctagttccaagtctccctcgaggttgtcctcggggaggtcttccgaacgagtgcgggcgagttgggagtaccgtcccaagtggacgttcgagtacctgcctgaaccgagctttgatcgacgattttcaaggtccaccttgagccggaagtcggggtcggtggatggtcggtgatcgatctcgatatgggcgattcgtctttcaatcattgacgatcggcatggaggacgaggaagaaaaggtccgggctcgatttggctggatcgacgtgatgacgttgtcgagggcagtaaaggtggagagtcgagccgcatggtctggggaggtatatcggacgtaggatttggtatcgggatggacttcgggaaggtggacaaaggcgaggtgggtgagtttactgtcgatcctccgatccgggcctcatccgatccgtgttccggttgacatcccactgcagcgccttcccgcaagcccaagccgaccaacccttgttctcctctcggtttcaattcttccctgagttccgtcccagtagcgtctcccctccacttccaatccatactgaaaagatcgttcctgctctctcttcgcggtcgacccccgtcctctgcggcgcggagggaggaagagctcgccgtggacctcctcctggacgagggcgagtctgggtgtcgcggtgatcctggaccgaggtaggcctgttggatcggccgcgaggcgaagattgtggaaggcgaggtgttgtacatgatccctctgccatgcgatctatgctgcaagagtcgggggatgtctgtctatgcaggcaggtccagatgctatctgggccagggagacgattcgtcgcgatgagtcttgttgaggacgaatcaaggcttgacggtcgtttctcgtctagtcattacaaggtggtagctagcgtctgagcggtgtcatcatgtgaacttcatcgacatctcgactaccagcgatgataggaaacggtgcaaccacccatcacatgcatcacaagcatatcttgtccaattctctgtaggttcggtcgagcaagttgcggaagcaaaaatgaggagagacacaggttgagacaggttgacctagtcgttgactatactacctacttacttactaccaccgacccaagtcaactcgaccccattagtattttctcagaaatcacttgggagccacgcaagaagctcaatcaagacatccaccaccttcgatactgatcgctggtggagacaagcagacgcacaatctaccgcgactcactgagcaggaccaaagactcacaccacctttcacgcacttacctcttctaggagcttgggtctttccaccacgggcctccctacctcttatcatggcatcctcggaacccgccatgctcccttccaatgcgaacggctcgacgcatgtacaggaaaagccaatggacgtcgatatggatgtcaacgggaacgagattagcaaggctagcaagcgggtcgcctagtaagtcgtcgtcgtcgtcgcgcctcctgttgcacaaccgggacgactagctaatcgaatcatgtccatgttcgtcccattctctggcacctatccatgctctccagctactacgatcgtaagtccatgtccacatccaagtcccagacccatcctcctccccgacctgatctgaatccccgacctcctgtcctcattctcatccccccgctcatgcacccctcacctcgcccggcctcgcagacgacgtcggcaacttttcatacgggataggacatcctatgaaaccccatcgaatgaggatgacgcacaacctcgtactcaattacaacttgctggaacatatggacgtttatgtgagtctcgatacgtcctcccgggttgtgagccgggttcgatcccgggtcttccctccgaagtccgtctttcattgttcaacgcgagcgacatcttcctccacatccctcccgttccagctctggaccaagacccatcccctcaccccgtactgaagctgatcataccaacccttgatcccccccctctcgatcgtctttctccctcttagcgaccatcccgagcgaacaaggatcaactcacccggttccattcggacgagtatatcgatttcctagagaacgtcactccggagacggccgaggagatgacgggtggtggagttcgatgtgagtttcgagtcgcggtttatgctaactggcacgacgacgatgacaacgacgatgaggacgccgagcgctgatcccgagtggccccatgtgatcttattcgtcctcgtcatcgtcccgttgagataggcttgaccggggaagattgtccggcgttcgagggcgtgttcgaattctgctccatctcggccgggggttccatcggtaagtgatcactcgcgttcccccatctaatcccttccaatccactctaccgatcgacttgtacgggcgtcccgagactcatcttgtgtttgggtaaacaggcgctgccgagaggttgaaccggggcacggcggatatcgccatcaactgggctggaggcttgcatcatgcgaaaaagaccgaggcgagtgggttttgctacgtcaacgacatgtgagtggattcgagcatgcgtggttcactcgatggagaatgtgatgctgatgacgccgatggacgagatagcgtgttgggtatcttggaacttcttcggtgagcttcttgagccggtaaacatattcatgcgtgtagtctactgaccatatctacatcgtattctttatccctatagacatcaccctcgtgtgctctacatcgatatcgatattcaccacggagacggcgtggaggaggccttttactcgacggacagggtgatgacggcgagtttccacaagtttggggattatttcccgggaacgggggatgtcaaggtgggtccaccggacatgatgatgggaatctcggcagccgactgatagactgaatacgacgcgtacggcacgttgtaggatacgggaatcaaggctgggaagaattacgccgtcaacgtgccattgcgagatggaatcagtgatgcggcgtaccaggacattttcgagactgtgcgtttctcgcgactcaggtcgattggtatgttgtttaagctgattacgggactcctcatctcggccgaccaggtgattcaacatatcatggactggtaccggccgaccgcggtggtgctccagtgcggagccgattcgctagcgggagacaagctcggatgtttcaacttgtccatggcaggcaagtcggtcgtgtttacacgatacccgcactcaaggtattttagttgacatgctcgcacaactttaggtcatgcggcatgtgcgagattcgtcaagaaatttggtttaccaacgatcgtcgttgggggaggtggatatactacgtgagcgttgttcagattcggtaccgcttcccgaagcacacaggctaagatttttttgtggttggcacatcctctagcaaaaacgtagcaagagcgtggacgaatgagacggccgtgatgtgcgggcaagaacttgatgagaatctgccttacaacgaatagtgagtctcgagccaattgcgctttaggggttcctcgaaccgaccgaatcgtcgcctttctagcatggaatactttggtcctcgttacaagctggaagtcctgcaaaacaatatggaggactacaacagcacggaatatctatcaaatatcaagtgagctcgactcgcccgcaccgatctctgtcatgaccgcttatgtcggattcctaccctagacaacgtatcatcgagaacttgcgaaccatgccattcgctcctagttcccagattcggtcggtaccgagcgtgtcggtaggccaggcgatcggctcgtcgacaagagctttcgcaccggacgaggacgtcgactttgagctggatagcaagattagaggtgggactgctcgtcggggccttaccaagaatccgctaaagtagtctttgatcttggcagacatcgtacgggcaagaacggcgggagacgcattatcagacgacgaggacgatccggtcgatagcgaggacgatgtagcagatgttggcactgcatttggccgatcgaatcgacggaaacggcaaggtggcgtgagcgcaaggaccggcaagatctcgatgggaggcacgacgggacgcacaacatcccgccaacgaggcaagcagacgattgtgtcaggatattccaactccgcagtggatgccaacgctcgattaggatcgaacggcagctctgcgaatggtccgaggaagaagaggtctttcttcgccactaccaacttgccaccgatcatccctctcgggtcactggctacaaatggtacgagcagcgtcgagaacctcgtcggtcagacaaaggcggccaatggaaagacgtcagcgatacgggcgtccgctgcagtgagaataggcgattcgagttcacggtcgaggataggtagtccaatgagtgtagtatgaaagggaggatctcaactggttgtatgacattgacatgtaggctgaggtacagaagatctcgcgacccttcgagctttgcgtgggtcgatgtgactccatgcggacaactacgtgaccttgactggacctcgaccgggacctgttacgagcttgacgctgcgacattgattcgtacgtcatcgaaaccaaggaaagtcaggcgaggtgcttccattgtcgagcgataccaaggagagcgaagcttggcgctcgggcacgcctttttcgaataaaggagccgtacgttgacaatggaagccttcaagagcacttgaaaggaaggaatagaccaggcgagctgtacattcgtttgcgctagtctacactgaaattctcaacgctatttaggcagtacaggagactgtatgtcatcttggatcctcttctgccgttcacaagctcatcgcaactcgatcaaagcgacttctacattcgatgacgatgtcaaagaacccggaaggaagtgggagctactacccgctcgacgatggcgaatactacaacagccgtacagaggcatgggcacgtcagaccgaggtcgacagatacgatcagaccagccgacatcatgatagcagtaggactcggcctccatcgtcttatgatcggggtagtcgggattaccaagggtatgagggcagggcgacggagcgacacgcgcgggacgggcacgacttctcgtgctcacagggcgaccagacgagggacagtagctgggaagattatgacccatcacgccggacctctcgattacctagagaacggccgcaggtccaggaagatcagggaagcggcttcaatggtcgaagagctctattagcgggagcgatcacaattggcggcattttggctatgaaaaagttggacgacgattacaacgagggcttgaaggaaatacgagaagcagaagagaaagcccagcgacgagaggctcgtaggcaggaacgggaacggcagcgggaggccgaagcggctgagatcgctcgttacgaagaggaagaggcggctagaaagtacagagagtacgaagccgaggagagacgtcgtcgttggtaccgttagtttccgcgctccggtttcagcccgatttgcgcgagtctgttaggaatctctgatcgcacgtgatcgaaggatgccatgtcgtcaggcaattcttatctaagaacaaagacatcgcaagtgacctctatcgatgtctcgtgattgctatctcaaaagaagctcgacaggtaattctcactcatctaccatttcgatatatgaatatatgaatatatgaatatatggagaagcttataatcaattgcctgtggcataacgccgaccacaacaggtgaagagggtgtcttgacgccatgagacgacaaaggagaagcttccatgatgcgaatccagctttcagatccagctttcaaccccttgattagatgacaatgacgtgtatcgtcattcgcatggcagcgggagagaaccaaccttcggcgcgtcctttgtgagtacgcgaatgcgattcgagagagaattgttagccgggtggaaggcatgctccggtggctgtgtgcaatgaaggccgattttaccaaaagccgcttcattgaagatgtcgtgcttgatgcttcaatttatgctcgattgaccctacgaatcaaaggacgactggagattcagttgcctgaatgatgcagagaagctgccacgatttgcagatctgcgcgttctgcagatactaaagttgcattaaggttactaaaaagaacgagttatagacattaaattgaagaagcatacaaaggaccaccccgctcgccggaacatggcagacgacaaacggcagatgggtcagaacaagcgcgagcggtcactgtgatcacggctaacgtcatgggatgctagatataaagcctgagttcttctctgaacatttaagcttacccaacttgactggccctttctccccccctacatccacaatcagtcatagaggctaggctaaccccttcgttgcgacacgctcacaaactattctgctagccccccaatgaagtggtactactactatgataattacaaagtctgctggtgcagacctgcagatggttctcccacgaagccctatatatggcaagatgatggcaatgccgttgcgcacggacattcgggtcgctctcaggatatgggcgaagccggagtccaagtggaagcctcttacgacaaattcatcaaaggcgagcctgctgggaacggtcgtaggaatgggtccggaaggtaagtcgggatgtaatacaccgggatcgatggtccagtctcatttagggccgcctcaactcgttagtcgtctttttgggactctcgctgttggcgcggcagtagcggcggcagcgtacgctgagggcagatacggcaacgacgttccggcgcaccaagaagagtatgagcgagactctattcgaactcaaagcacgcaccgacctgtagccgaagcatacccgccttctgagcaagccagtcagatgcaactcggtgcaggacgttacgatagcgtttctggttccacaaggtgcacgcttggtggtttggaatatcgggagacgaattacgatcaggtcgccaatcagggttggaatgacaaggagtctagatgggagaggcattgggatttggtggaagaccaagaaactgacgtcaaaagctttgtgacctttatgactgagaatgggaacactagttgggccgatacaaccccgcgttattaggctagaccagcaccggagtcgtcagcgtaaaatctagctcgagtaagttgtacgagtacatcgcctgcaacattttgttcatcatgagatttatcgatcctatgccctttacatgaaggacatctccggggtagcgcgggtaccgaccgatgaaacataccgagataccggattttccagcaagtaatattatagaatcatagccaagtgatttctccgggctctcaatcgagacgacaccacagagaatcctgaatatggaaccgagcgagaatactaatgataatggcgaacgatgtttgtcctgttggagctctcggctgttctgcagagcagtcgatggaggatatgacctgcctgcaagggctttctttggcccccatacgcttgctttatcttcactgcccgccacaggtgtaaggaagatttgagtcgtcgtggatcatggccgatcgcggaaagggctcgaggtctgaccgtgctttggatctgtgcccgaagaaaagctccaccaatttggatgattttgcattcatgtgcaaatgagcaggccctttttctcgataggaggagtgtagagacgatttcacatcacgagacagtgccagaccgctatcactggaaagaacgtcttgattagtttcagcgatatcgaggaaacaaaggatgtggtaaatgaaggaatcggtcataggtcgtgactgagaagaggtgcccacacgctcatgtatatacacgagtatatttatagcgccttgctagaagcgaacatgtgagcgtgtcagaagcatagggaaccgaagtgtcattacgctcattcacttgacgccatgtcgactatacagtacgaagacgaatcgtcacacaaccccgttgggtacatccatctgataggcgataggtctggctcagagacgtctacctgctctacgttcgacgatgactcaaagagctcggaaacgacgggcgatgccacggatctgtccgggcctgtaaatcgcggagacgtttcaacatcgcaggatgatcgatcaagcatgcaggtacacaccgggccaacggaagacagttcgacaatttcagttgacagtgtctctatccgtcaacgcaggaaccgattgctgtcaagaattgaggagcagattgagcagggaaaggaagcgaaaagacgcgcagcattcctcatgaaacggatgaagcaatcaaagaacgaaggcagtgtagtcgcccatcgatgtgcttgtagtctactcaggccaatgaccatccgaaagccttccggaaacgatgactgatggaaaaatcgtgacctaaatgaccttgtactcgctcgaacacgcatctatggatctcacgaatgttctacaccaatccacaacaccacaaacaggactcaagggggtcttgatagcatcagaacgtggtcctacagaagcgcaatgcagcgcaggctacaagctacaagaagcaaaagccaagtgcctatctatgagcggcattgtctcgaatggtgtatcgctgtggcgctacgatctaccggatggtctgaagcgaagcacaatcaaatcgatgagatcggcaaaagggacttgtactgagcgcctgcgaacacgccgaatcagccaatagaaaaggattcaacctcaaggtctcgccataagcacttcatctggcgatacttatcaaactcaggcggctgattgcgcgacaaaggagtcctctcctcgtcgcgaaatacgtggacagacctgtgagaaacgcgtgctcgatcacgatcgaggagcaaggaatctcttgcatacatatacctaaacctgatcgagcgatccactggccacgttcgtaatgattgaagcatcgaaacacatatgggtcaggtcgagctgtgatactgtcccatccccatcccgtgaaaaggtggcggatatgaagatgggttgacgcgagacattcatgggaaacaaaatgcagaaaggctagaaggtataggtacttttttgagcgttcaagacgatatcgaccgtaacaagtctttcatatccaacagcgcatcacacttgatcatatcaattgcatgatcgactatcgagttagaagtcgaatctatcctctccctggtgacgcaactcacttatgctacttagaagccttccaaggtcgaagagtctacggtcaattcctcggtagatgttcagcgagatggtcaacctagatccgcgatgatgagcccaattgatgctggtcatgtagaccggtcccatccatcttcaccaagaccgtcacacatatcaacccgtcatcatcatgtctctcttcggtggtgccaaggtgaatacaggctgcgtttgatccgccacgacgcgttgccaactaatcattcctcgatcgatacaacagccagcgaccgggaccgggttcagcttcgggcaaggcccagcagcaggtgctgcttccaaccccccagcagcccctactttcggtggattcggtatcaagcccgcttcgacgtcgacggctcctgcctctggatcgttgttcggtagtgctcagcctcaaggctcgttgtttggcggagcacaacctcaacagcagcaacagcagcagcagcagcaacaacaacagaacacgggggggctgtttggaagtcaatcggggacgacgggtcagcaacaagggtcttcagcaggtcttttcgggctgggacagagcacatcgaacaacaaccagcagcaacagcagcagcagaacgggttgacatctagcggattgttcggcggggggagttcgtttggagggtttggtgccaacaagccagcctcgtcgaccatgttcggccagccacaggggggacaagcacaacaggggcagtctcagcctctccagtattctcagcaacagcaacagcagcagcagcagccacaacagccacaacaacagcaactgcccccttggtccagcggttcggggattcagctggaatcggtcttccaggtggacattcccggggacatgttattcgaggatattgagaaaaagtttcccgatacggccaaagccatcttgatgatcgagtgagttcagtcggggtggcatgtcgttcggtggggcgtaatagctgatgaagagctttcgatcggtttgtagggaatcgttacagcgggagaggaacgtgagggagagcattgatgtcaaggaactggggacgagcttgacgcaagaccgatcagacatcaccgtccttgcttctgtacgttcccttgcctaccgattcgagtctttgatcatgacagactggctgaactcactgctcttccgtcttccagggcatgcaagtccaccaacacgcgatcaaggaactccgacgacgggtagatcgactagctcagcaagccgaggagatcaataatgtctggcagacgtgcgtcgaggtgctcaagactgcgcacgagcaaaaggtttcgggagggagcatggtctcgcatcacgcgactttttaccgagagtgagtcggggcgggccggtcggtgcagggaaacagaggaggaggacgcagagcttatggtgcatcggatggtcttgtttcagcttcttcgccaagctagcggaacagatgaaagtgcagatggctcagtacaggaggacgttcgaagtgagtcggctcggtcgactgatcgtcaagtttgcgatgacgtcgtggctgatcatcgttccgggttgaattcggctcgtagcaaatcgagaggcagctggttgggatgacaaaatcgtcgaacaagcctacgccgcaaggtgagaccttgtcgaccgtctgctttgctcatgctaaactactgtttgtttcttgcgcggtcgcagctatcgcgcagacggtttcaaacaaccagaacacgatcatgggccttgcaagcgacatgtcgagtctggaagagaggatcaagaacttgtcggcttattaccggtaagtctccctggcgtcctgtctctgacgcgctcttgcatcgcaagctcaccttgtgtcttttcggtgcgatcatagtcaagcttaccgatcaaagatgaacacggtcgtcgatcccttcgtcatcgcccgagccgaggctggagagcctcccttgggtcatagcgggcagaggggggagacgagcctcaaccacgatctcggcgagttgaggatgggttgagcgagcgcggggtggtagaatttcatcctgtacatgattgggtcatgtaacgaacatcatatccgaacgtgctatctgcaatctgtctatctgtaggatggataggatggtgtgtgccatgccaaagtcgcgctttctcttggcatctcgggggtcgggtaactatgacgtatgcaagtggaattcaagttacactcatatgatcatatgaccttgttcaaagtctgtgccaggtcgcaggtcgttcatctacccaaaattcaacagtagtacaatagtagatccactcggcaaagaagtctccacaagaatataccaagaatgtcccaaatcccttccacctgccgcagtgagtcatcaacacgtcgcggcatagagagatcttcctgaccgactttatcaacgtccccattcacagcctggttgcagactgtccggggcaaacccgcagacgcattgaagctcgatgagagtgcaccggtcccgaagcccgccaagggagaggtccttgtccgaggtaagtatcgagcggactgtcatgccagtatcgcagcaccacgttgaacagcttcttaacactcgttatgacagtccattcggtcggcctgaacccggtcgggtataagttgatgtccatgaccgtatggcctttattcaaactacctgctattcccgagctggacttttccggtactgtcgtcgacgccaacggcagcgcttggaaggtcggacaaagtgagccagcgggcggatctgaccttgtgctttaaagacctcgacgttgatatgatggatgtatagacgtcttgggaaggtttgccactggagccaagatgaacaagggtcaaggagctcttaccgaatacgccgtcatctcggtaagtgttggtctcgtggtcgagcagcacaggcttctagctgacgacgaggacgtgcttgtcacgccaggccgaaaacattatcgaaaagcccgactctttgccattcgaccaagctgctggtctcagtaccgtcggtctgactgcattcgactgtctgagcgtgcggccccaccaggtccaacccggttcttcggtctttatcaacggaggatcctcttccgtcggtcagatggccgtccagatcgccaggaacatgggagctaccgatatcgccgcgagctgtagcaaggagaaccgctcgctcgtcagggagctcggtgctacggacctgtacgactacaaggcctcacccttgacggaacagctcaaatcgtcccgctcgggcaagcctttcgacctgatcgtcgatgccgttggttctcctgaactgttcacgtcgtcgacgtcgtacctcaagcccgacgggctgttcgtgaccatctcggccgacgggtcgacggcgggccctatgggtatggccatgttccgacctaccttcctcggtgggactccccgtgccttcaaactcgtcgtcactgattggaacaagggtcactacaccgacatgctccggtggcaagcagagagtgagaccagcgagaagcgctctcatccattcaagacctagctgaacatttactactctgtgttttctgctcgcagggaagctcaaggttcctatcgattcggtgcaccagagtacccagcagggtgtcatgcaggcttacgacaggatcatgtcccagagggtgagtaatggccgggcttgcgccatatcggacaaacacctgataggcggggatcgtctttttcccgacaggccaagggaaaggtcatcatcgacatgcaaggatgatctggactagctattagcaatatctgccgctgtatcgattggctgagaatctgtagctcgaccgaaggatggctttgtttcaaatgataccacgatgattgcaactgtcttgctgggatcccacatgcgttcgtgtgccaaccatcaggtggtcgggtggccgaccgcaattgccatcctagcagcacataagccaatccatggcgtgaagtttgcaggtaagaaggcagatccagataagccggaatcaacactgctactccgtgtacgacatatctgaatccacgggctcccagccgagacttgatcatatgccaagtcagactgttcccaccaacatcccatccatgatctgctctcatcccaagatcactgagcttgcctgtatgggcttcgaacttcaagcgcacgtgggaattgcagaacccgaagaaagccgcatcgtcaacttgcggatgaatgggattcgatatacgccccgatccaaccatttcgtccagattctgatgatacacgatgaagacccccaccctcgctgttcctcctacccgtccgtccaatcgtccgtaaatcgcctcgcgcgggccccgtcatctcctccatcttcgagacgaccgggacatgaagcttagaggaccccctcgtctactcttcgtcggcggcttcgagggcggcctttttctgggctacgagttcttttgtgcgtcggaggaagctgttcgtgttgatcgagatgttttttttcccaacggaaatgtagtggtggtagtgatgggagttgggaaaccgggttgtaggcgggtttgtgatatttatttgggagggtagcgatcgtttggcgtcgagcgtgccggttgagcgtccaggaaggatcaggaagaagggacgtagatcaaagacaaagcggagaccatccatgcaagtgtttcgggtttatgggggtgacgagagcgaaaggtcaaaggagagacgattagctaaatgtcccgtctgacactctcggaaaggcaagatccactgactcgtcgtattgacacctgaagaccacaagcaaccaattcatgatcagctcaatttatggatggcctacattatgcctgcttacttctcgtatccgtgcctatcgttcgtcaaacagtagcgggttcagtaccggggttccaacctccgcttcatgacgcctgcccgactcaccgctcgtcctcgcacttccaaggagcgtacaaggtcttgtgtcggcacttgttcagaggaatgagaaggctgagcaggtcggagcttgtcgtcagtcaagagtcgccagccgggaaattgtgggatgaatcgctcacgccgaacactggtccctccattggataggtacccgagaggcatccatctccccctgagaagcggttgtcgaagcggccatggtgtacaagtcgtaaaagttgagtgcggtttctacgtagaaggtatatgactgtgcagataggtgcgtatagggagatgtgattgagaatgatcagaagacgatgcttcgaatatggtcaaccggtgctccgttgctgactttcccgaggagccaaactcgcccgttggacgagatttgattcgcgcgcgacgagaaatgagcgcaaccttgccccatatctacgtgggcaacgacaggatattacgggatctctatagcatattacatcgattgtctgctacagcaaaaggtcaggcgaggtcacctgcctcggaactcaatcctgcaacttttcccatgcctcttcgatgctcctaacgaaatcgacgacctcgtgtccgtcctgctcagaggagcgtcaatgcaagacgatcagtcagacaagattcagaccgagtgcagccagaccatccctactcacgtcacaatcgtaccacgatccatcgtgcacacacctcttctcaccctggagcaagatcgtgcagctcttgctagatttcaagacgtccctcgacctcaccacgctatcctccaacaacctcgcccctcgttcctctacacacttgcccacacccgactcttcccaatcatacccgaccgccatcaaattcgtcttggcatagtcctcttgcccaatcttcctcgggtcgtagtaattctgcgccgagacaaaggacatggcggggaaattgacgtgcatggcgatcccatcgtcgttggtcgtcggggccgtcgtggtgtagacgggcgggatggtatgttgaacgcagagttgatggatgtttccacggcactccacatcaccgtgcatgcactggacgccgaatttggctcgtttggaagggctgcgattgagttcggaacgggtcagcgcttttaaaggtggcgaaaaggtcgtccacaggactaaagccaggtagtgtactgactttccaatatagttcagggtgaggttgaccttgttcatgacgctaggttcggacaagacctggtcgtagacgtcgcgcttcgtcagcatcgaggcgataattacgcttacatcgccacataccttgtcgatagtcgcttcgcagatccgctaagagcagccatggcgaagtgcgtactgtaagtacgaggccgatctgcgatacgacaagtttcgtgcacttacagcatcggggcatcgactcatcacggtcaaatccaactgaaccttcctttccctgggctccacctgatcctgaccctgaccctgctctacctccatatcatcctgatgctccacccctaccagcccgcccgcatcctgttggattttcttgagcgcgccatcaaactcccaatcttcagctccagtggggatcgagagttcttcgtgttgcttgaccgggggcgggtaggtgcctttgttcgagtggagggtaaagaagaggatgacgatcaggaggacggggacgaagaggagttgcaaagggttgcggtttgaagagaacatgttgtgcagctactcgatgggtgggtagtgagacaattagctatgaatgtctgcgcaggttcgaagagtgtgatgggttgtgatgatggtggtgatgatcgatgatgcatgatgatgatatcgtgatcacctaaattgaccaaaagtcaagcgacggccatatccggaggagcgaagcgtgacgtgatgaaaggtcgacggtcaacttttggcgagcttattctgcacagaattgtcattcgatccgtccgagcgccactatcaggttgctgatctatcatgtctggaatgaacatggacgcaaagtctatagtcgtccgatactcgccccgagcagacggcgtgacgggctcggtcgaggggtacaagctgctcgaaatttcaaacgagttgatgaaggagatcgaccaagcagaacaagcaggcggcaacctatcgtaagtctcgactcaaggcggcaggtctcttctgttaggggagtctgaatctgattctgatcaacacagtctgacggtcaagggtaaacccacagacgacgctgtcatctgcactccttcgtcaacgtatcaacttcggacaatctccctctccaattctctcctcgtgctcgaacagcccaccgcatcgtcctccaacagaacgggcgcagacgcatcgaagactcccgagcttcatcttcaggacacttcgcatgagatcctcgagctcttgcccatcgtgccaaggctcggacggatagagaaggtcctcaaggaaggggcatgggagggcatgggtgagctcgccgagtctaccgagtcggacggagatgggaaacggaaacgagagactggcgacgtgggaatgcagcaaaatgtgagccgggtcgaacggtctttagaagaggtttgatctaatcgcaccgattcgacactaggtgagcgggaagaagcgctacacccgttcgcaactgtgttccgtggtacaagcatcggatcaagagctagatgaaggtctacgggagaacaacgtcgtcgagatcgatggtaagtatcgctacgcggccattccccaattcgctagaatcctatctcatgcatgctgcgtctcctccccaggtcacctggtgtatcttcccctaaaccacctcttgcccctcctcagtattctcttatctttagtaacgctgcataccatatctaccctcgacggtgtcgaactctcgtctcgagaatccttggatcgtcaatacttccccttggttgatcccgtaccgattcgagaaacgctcaagcaggaccacggggtacaggaagaaatctttgacggtctgcaagggctatttgggagaatagtgaaacctgaggggtcagagtcgatagaagcctgggtggtcgatgtcaagcgggtcattcgagagatgggcaaaggcatgcttctggaagagaacgtgagtgagagtccgaaatagttgccagtgatctcgctcgctcatcggtggaaatgacgttcgaaacgtcgcagaaggatgaaccgaacacggtagccgatttcatgagccgttggaggatggaggtcggggacgatttcggctcggctgtcgatctggagacgctcaaggtgagtggctattcagtcgtgatgcgtgttgagatttgacgaattttattgcttcgtaacgtctcaggggtattacctgaccgagtcatcacgcctgacagcactcgtctcaaaagacccttcaacagcgcttctcatccccttcccgcacacatctcttcctgcggatcccgctacacgctttagtgaactcttcctcacaagactcaaatggcggccagatgatatggaaccgttcctgcgtacactcgtcaaggcgggcgacaccaaggtcagggataagatggtcgcgaagtttgttcgaattgtcaaggaaaaggatggggtgtggtggtatccaaggcggacaacttaacattgaagttatccgtcgaatgctatgcagactattgggtgatgatcataatggtataccacctagaggaatgacctagggcaagtgaaaacgctacatagccaaaacggagtatggatcgcatactacccgagctcaattccttcttaaaccaggcaggatccgcctagattgtgtagttgggcttttgggtccgtttacgatcatggggccgctcgatgtcatccctggctgaatgctactcgcgaaaggagctcctaaagataatgccgtcatctgacctgtcgagctcatgattgaggtcgacgttgatccgggccctcctcgtcttggattaagaagtgatagggtcgagctaggctttgtgacgctgttgatcgagccgtgtccgctatctttgcgcgacgtcgcgacgtttcggcgacgagcttgagtacccgacgcggcgtttgcagaagggctgttcgtgatcgagttgcttccaaaatgaatggaagaggctgagtgggtgtggctactctcgttagctagttctaggcgacgagctttttcatgacgattctgagtaacgcggaagtctgtattgatccacgtgtcagtcgagcgatttacgtttttgggcaccttgtactcacgcctgaggagatcatcccacttgatttcatctcgagtagcgattttcgagcgagtagcagcgacgctttgtgagtaggcgctaaatgaccaaagtcgcgtcaaatgagcttggattacatccaatgaggatgcttgacacttacggtttagggatatgtaaaaagcccatggagctgacagcgttgagccggttgcgcagcgacacaaatgcgctactttgtggtagaagcatgagcagaccgtagagacacttgaaaaggtaaggatacttttccggctctagcagttgcaaccgaagagctgcatatcccgtacacggtcagctcgattgtcataggtatcaacacaaagcgctcacatgtgaacactggactctcgatcaacatgacaagcttgtcaatctgtaccagcagagccactgtcatttccaactcagcactaagggtagggcgtgtcagacctgttgacgctgtagcctggtcaggatcacttacaatgtctgcagtagagccgaagcgtgctcgtaggcttgtgccaacaggcaaagagcaaacacggccacggcattgtggcaccaggacttgtagatcgaggtgaacaacatctgaccatcctatacgacaagaaacgacacagcagataagagtccgatgcttccgctgcttctcaaacgcagaaatggagctactgactttcgactcgatatttttcagccgtttcctaaactcggccagttcaggcgacgtgatcaagatcatgttgagcttgacgaccatcaagctcgcaaactcgagatcctgcgagatttcaatatgtcaaatgagcggccgcgttccggtctcaagaaggtgccgactcacatcattcttttccagaatctcagccagattacggaagatgcgctccgtattcagattgaggcacagctggcggatgatcagacttccgcgagtctcgagcaggcgccgatctgtgctgaacaactcgagcaggttgaccaggaagctcgcgaaatacccgtcatcggagttggccgagatctgggctagcagttgcaggtcgtgcttgacaacctcctccgacgggtcagaaagggttttgagaagcgctgggaacgtcccatcatcccgagcgaggatctttcggtcgaaaagcggcaccgatcagacacacacgaaaggcgacgctcaaaacagcaccttttagctcaccttctttggcgatttatgatgaagcatagacagccattctagagccgctatacgggtctcttcgtgctcgctcaagaactgcaatgtcaattgattgacagtctctcgtgcatcaaagggatcctcctcgcttgtagcagtttgaactgagtcgcgcttctgttgctgctgttgcgagatgatggacattccagggttgctgaccggaatggcgatagtcgaaggcggttccccactcggcttgttcggaaattcgaaagtcactggggtctgagcctccccgggaacgggattgaccgcgatgctctttggttttaaggtactacccaggttagcgatgttggactggctatcgctcggcttgagggcagtcggagcgatttccaagcttttccgtcgcccatgcacatctcccgagagctccgctggagcggtatctctgcgagcgttcgccggcgatatgctcaaagaattaggagccgaagccggtgctgtcgcagtcgcagcgctgctttgacctgttgatagcgaagctgtctgaggtgcggtcgcagctgatccacttgggaccgtttgtgttgccgatggcggggcactttgagggacgggtaatgcttgtatcactctataaagaagctgattgctctcgttcgcgacactttgtatgtacgacctatgcagcacaaagtaagcgacgttgtataaattgcaatggacccagcttacacgtgatgtgcgaggttggggagaatcgcggcgatgagtctcggtgtaaacggtaccatcacctcttgtacaaaggtgaggaagctggcgatccatttcaacgagattgattgaatctgttcatctggtaaggacgaccgaaacgtcagagccgagttctgagtacgagttgaccaaaaaaaaactgacctggatacgacaagtgctgaaccataatgtctatgatggctgcatggtccacatatactccttgacccggtatccacgcgccatgctcctctagatcgtcctcttcgtcgtcctcttcggcatcttgactcgtcatcatcgaattatttccgacctcaccgtctccttcgttgatgtagcgatggtgtttggctcgatgatgcgcttcttcatcttcctcgcgcagatcattcaggtgcccgccgtctgggctggtcatgtcccgatcccgatccccatctccgcccgtggtccccgtgccagcataattagagtcgatctcgctcgtgtccgtattcatggtaagcttgctgcctctcctccggagcgggtagccccctacacctgcgctactcccatgaacatcggacactcgccttccgtggccatagcctgacgcgtaacccgtggaacgacctgtaggtggcacgttctcgctgtgaccgtagccgtcgtgtcgagcttgaactcgagcgatgtgtctaatttctctcagaaaatcggctaagacgttttcggtcgcgatcttgacatcagggttgggatccgacaagtatttcctgcatggaggctatgtcagacgtttgcccggactccgccggtgaacgagactcacaagaggccgtccagaaattcgggcaggtagctgacgagctcgagatcgggtattgagtcgaggatcataatccagctgatgaggtgacttcgtgtaaaaggcgaaatgacatatatccgctccgacagcagggggacaaatttggctagcgagaacgctacacgaggtttaggttcgcgcgtgtcatgtctagctggagctgaagagattgaattagttccttcttgtcgctgcagatggttgtggtgatgatggtaggtctgatgaggtcctggtgatgacgaggtcgatgacggaccggcgtttgcgttgactccgaggtgttctcgcggagcagtagtatgagatggtatagatctatgatgtgatccagactgctcgcgaacagagcgagatatcgaatgcggcgaggggtccctgccgacggcgtctttgccttcgtctctatcgccatcaaggtggatgctagccctgtttccggccttgtttggtccaggcaaatccagtccagccatgacgggactgtcttccagaggatggctgatacccttgtcgacctctcctctggccatcgacttttgtcttctttcggctttgcgttgttcgaaccaagattcggcctcccaatctccaaacgtcttgtcgacgttctcaggatacttggagacgtagttcaacgctgtctcggcaacgatatcctttagaagtcggtccaagagttcagcaccgttctttacggaagcttccgagtcggccgagagctgcgggcgaatatatcagcacgtaaactctggatctttcgtacgaagactgaccttgctgagagcgtcgaatatcccgttgaagtgcaccaggatttctcctttacacactttcgcaatgttgtacaagctctcgcacgcgtagtatctgcgcatggacagaccatgaccgtcagatgtcgcccggttgcgagaaatcccgggccgtgctcaactcaccggaccctgctttctggatcactgaaacaggctagcaccctcggaatgacgattcccagccatttcgagaaatcctgactcagcgcgatggccgtagctgcgagccctatcaggcctccgttccgggtatgtagggccgaggcagttgaagtgaacatctgacatagctggttgatgatctgagtgatcttgggtgtatcggcgtgtgcgacgactctgtgcaatcaccaaggagctgatcagcacggatatgcgaggaacgagactatgcgctctgactgacttctccaactcgagagccgcagctttacgtcgttcgtagagtttgtcattaagacctgcgaacacagcgagatcatacgatgagcaactgtaccggcttgctgatattattaggagcaagaacatcaactcacctcgcacaataggagcgtctatagcagaaaagccaggaccgatcagctatcaagttcggaacgatgcgatacacagctagaatcacccatggttccgctgtcctagctagctatccagtcggaaatttgtaattgatccgccctttgatctatcgccaaggtgttgatcgggtatctgcgatattccttcgacggttctgatgcattccgccacgagctcgcacaaagcagaaatcgacactgtcaaaagaggtccagcttgggtcttcccgcctcgagtatgattcgggtgccaagaagctacgttcacatgtagcagcgtgcttgtgcatcagcgaggtgaccaagtcgatatgatacaactcggttcccgtcaagcccgaggtggtcggtcaatcggaaatcggtgacgtaacgcttcgaaaacagcgtcatgttcaggttcgacaagaccgcatcgtggtcaatcagtaagaccattggcatggtgattgctgatcgatgatggtatgtgatacagaggcagtacatgagaagaggcacaggcttccgctcaagtgacggtaaaagagcacacatctagacgtccgaaacaagggaaaggtatcgtgctgtgatttgcataattctgagcgggacaatccttgctaatgatgcgggcttatccgaagggaaccaggtaggcgatgctgtagtaagattgatatgtcaatgattatgccacctagaatgagggtgacaaggggcagcacttacacgacaatattcagcgcaatgagtgggactagacgaataacgacgaaggtggtccttcagctaatcctgtctcaacaacgatagtgtacccattcgctagactcactcctcaacaaggttctcacggcagctatcaggttgatcaacctcgccttgactccttgcccctctccagcgcctcctcctaccacgcccgccgacccagcattcggatcgttgttgtacgatgggacagacccgaatccggcattcgaggacgaggcgatctgttgagccgagtacgtcgaccaaccgactgcacatggtaatcgtagagggttagagccatgagtttgacttgaaagggcaagtcttccatactcgagacgtggtacgcactcttggccaagaatctttcttcgctaagaatggcaatcgcgtttgttaatagtaatgccacatagaggatcgtccccaacgagaaagccatggtggaagtgctcgcgttcgttctggctaaacgttactgtgttgcaacgacaagggggaaaggtcatgggtttagagtaggtcgaattctcgcatgtcttctgcaacaagtgttgtgtatacgttgtgcgagctcctgaaggacaaccgagcggaaaatgacacgtcacgagcccgcgaagagtgcgtcggaaagcacaaacctgtcctcgacgttcgacacgatctcgaggtccatcacgccgtaatcgcctgagcgtaaaggtgtcatccggcttggtttaactacatacatcatcacattgtcgtatcataaatttcgttactacttggctgacgtcctcccacggatcgaaaatccaccgggcgcaacttggggggccaggtcaatgccggcattggcgaatcctcgtccccgccgctggactccatcagacggtgtgacaggtcgttctggcaaaggagctgttgggagcgctgtcggaggcgagccgctggtgttcatcctcgccagtaaattggggattggtctgcgatccgatgtaggaccgtaatcaacccggttcaccggggaggatctcctcgcctcgtcttcgtttcgaaagtgattaggtctatctgacctatgcttttttctgtaatcttggtcatttggcgggataccgggtaattgaatgccgagtcgacttgctagcgatggcgtcctcggctcggggtcacgctttcgtttcggggtcgagtcgttttctgtagcgatacgtccgagtaaagaaggtcttcgctcattgcgtccggaatcagccgggctctcgggtctccgtgctgaatctcgaatagagaaaccagaaggtggccccacgccaatcgaattggcagaagacatggctgctggcctagccggccgcctgatactgatctgggccggctcctggcgttcgcgggaagatgatgcgctgggctcagctacaggtggtgtagttactaatggcttggctgagatggtccaggaagggtgtacagtgtcgagcctcgtaggcggagtcatgttctgttgattcttggtcagcctgcgaaagtggtgcgggaggcaagagactcacctgacacatctttgctacgttggtccacctcgcacgactcgtctcgtccgatccgtaagcgttggcgagtcctcggtcgcacacatcggcaatctgcttgagagcgagttcgagcggttgatctaccaaatccgtgatttgccctttctgcaagagcaaggtcagatctccggctcgtcttgctcacgtgctcgaatacgtacgaatttgaggaacaaaaagtacgatagcaacaagcacgcctcgagatcagcgatccgcggcatgatggtcaccaacgtgatcggtccggggaaccaggcctgagcaaggtcgctctcgccacgtcagctatcggtgatgagacgccttgtggccacacaaactcaccggcacttgagccacggccgtcctcgtcatcttgacgccgagatctctgatcgcgagccgttcatctgccgtcgcggcgcccttttggctttcctccttccacaagttccagctcgctacgacccattcgactagcctcgaaggactagcgacagctgtggggatttgtcctgtcggtaacctggcccattcgaacacggcggctggactatgacagtagaggtagaggagccaacggtaatctggacgtcggggcaggagcagaagtttgtcgatatgggcgaggtaagatttgaattgcgacgactcaggaggttccgatgtggccgtagtcacgattcgggaaagcagcgtgggatcttccgtctccagcaatagtcgaatggcacccgatttggaggcatgatctcctgcttctagcacctgcactcctaaactcagcaaacgcgccgagaaccactcgcactgagactcaccctgatcaggttctccttgacggctcgcttcggatctgtatccccgcccttgtgcatccatgcatcgatgtcgctcttggcaggaccctcgacgaaatcccaaatgagctttgccggcacgttcgtctcggctgaaagtagcgaagttatcaagccgatcgtaactccgggatacagtccgatgagggtacaaaggcatgattcgagggcttgaatctcttcgagtgagttgtcttgatgagctacagagatcgagctgttagtttacaattctaccctttgaagcgttgcggccagggactgacaggtatacaacgattgcaggagtacgtccgtcatcgttccaatgtcgtcggccgcctccatcctcgccaagtctacgacgagccggtaccccctgagcctgacctccttgtcctcgtgttcactgacatcgtacgctgcgtccaaagcggccggccatagatctgggaattcgacgacgagctcgggcaggtgtgacgggatgagcaagacgtcgtcgttcgagctagacgtggacgagctagcgatgagggcctcgagagcttgtcgccgctttttccatcatgatatattagccggagtcgtgagctgatcttatgcgggagtcatgactgaccgcatcggatcccttgtcggcttgagaagcctgacgaatcaggtcccctaatgaaccgtccattccccgctgtgtcggaccgcttgtggttcggctgagcaacgtcgatgaccactatctcgctatatcatgcagaatatgctatgtccagtgtgcactttcgtcgtcgactatggcctgagttacgatgcataaacgactggttgcctatcgctacttgctactggaagccaaactcgattgctagccagacgcgccgagattgaaagttaggaatcgattgagcacgcaaaatgattgggatagacaggatggtaatcccaacatgaccacgattacaacgtctcggaacgactatccgacaagaacttgccctgcttgatcaccgctctctattttagaggaaacaaagaccagcacggcacccaagactcgtcgactctgcgtacagagctcttctacaccaaataatgacggttcgcgactctatgagtaagtaggcactcgaccgcccacgacctctctcgaaagagaaggaagcgggtaggagcgccaggttttggggttgatatcgcgaatgcttttgaagatggtgatggagacctcgttggatctcctgcgttaagaagaaaaggagaaataaatcgtgtgcgagtagaaggaatcgatagagatccaaagtgtcgaccctcttgtactcggccagaggagcccgggcgagggaaggaaagaatttgggaaacgcgccgcgaaaacagaatcacgtgaaagaacagtgggcggcgagacgccacagcggcacgtttcgacggattcataaaaaaacatgttctactcgtatatttcgattcgattctatcgcagacttgaacaaacccccagatcgaaaccacactctactgcttgagaccggcgatggacgatgtcctcctggctcgaccaccggacatgatgctgtcggcggcgctcttgcgtcgggatcgaccaccgggcacaggcgcagtaggaggagctccttgaatacgtttgactggggatcgagagggagtgcatcagctcggatcgttccaacttgtaatttccgccagacgctcacgctcagagacaaagtcggtaccccacttttcactcgtgtgggtcgagacgtactacattgacgaccgggacgtgtcagcggtcacgtcggatcattgcgagctagtcgcgctcgtcatccgtcgactcaccttccacagcttgtcgtggttgctcttcttggtctcggcgtccatggtgacggcgtcatagatggcgtcggcggtggattgcacgtcccctgatcgcgagtccgaaccaggatcagccacgttcggtttccgcgcccccgcgtcccacgctcgactcacaagggttgatgatcagactaccgttcaaactctgagcggcaccggcgaattcggacaagatcatgactccgtgcttcttgacctgactcgagatgtactcgtaggcgaccaagttcatgccgtcccgggtcgaagtgacgaaacaagcgtccgacagggcgtacatggcggtgagctcgtccatggccacgctggtgtgcatgaaatggatgggcataaactcgacggttccaaactgcccgttgatacgtccgacgagctgttcggtcatgcttctcaagttttggtactcttcgacgtcttgtcgcgaggggatggccagttggacgaggacgaccttgccgatccattccgggtgctggtgcaaaaaggtctccaaggcgtgcaacttttgggggactcccttgatgtaatccaatcgatcgactccgatgatgaccttgacgccttcgaaacgtttttccaactgggccagacgcttctggacggtaggcttttcgagcccgtcgacaaactgcatgggctcgattccgatcgggaaggtcccgacgtgggcgtatcgaccttcaaaccagagaccgttgggcatcgtgggcaacccgaggatacgggtgcacgaggacaaaaagtgacgagcatagtcgtaagtgtggaacctgtcgtcgtcgtcgtgtcgaggacccagccgtcagcttttctcgatcgacacgtcacccccaacttgcccaacgacttacccaatcaagtcgcactgcaagacaccgagcaagatctccctcctgacgggcaagatcctgtaaatctcgctcgacgggaacggggtgtgcaagaagaacccgatcttgacgcctcccttgccgttggcctcggccgccttttccacggcagcgtcgtcgcgttcctgttgttgcttctgcaagcgttcctcgtcgaattcgtcctcgtcttctacgtcggcgactccctcgtccagcgtcttgctagccctctcgtggggcaacgccgaggggggtaaagcttccggggtgaggggaacaccagtcttgctcgtcttggcgggttggatccccatgactttggaaatgtcggtcgatacgcccacggcgaccctcgagagttccttgcgggtcgtctccccctgtgccgacgtgcccgacatcatcgtcctcaacaacattggcaagagcatcactacgggtccgcggaaaaacccaggtcagccacccttcgacgacccgcgcatcattcaccggactcgccatgactcacagtgataatcctgaacccaaaccatatcccccttgcctacgaacccgttgacgacctctgcgaacctcatgttggcctctcgataagccaaccagttgtcctcgtcaaagttcatctcgcccgggtgataatggaagaggggccagaggatagagttggagaacccgttgtaatgcctatcagcgagctcgtccgagaggtagacggggtaacagttgaactctctgagaaggtggtcttcgacctgttgacggtctttcatagggatctacgaacgagtatgaacgtcgttcaatatggatgccgaggaaagaaagggggggggaggattatagcaaaatgagatgacatgacatgacgacatcagcgaacgtcaagacggggtgggcgcgagcgatgtcgactcacgtcctgaccgggccaaccgatccaggtgaactgcatcgtcttcttgcacccagaaagagccgagacgagacctccggaagacatctacgacggtgataaaggtggtccaggttgggaacaggcatcggtgggtgggtttggtaagaaacgtgtgtgtttgtgttttgacgtgatgatgccatccgggggagagagggaaagagagaacgcaagtccggttcagatgtcgatcagggcgagaactcgagtcagtcaggacgagcatgggccgcagacgaggacgtgcgattagactgaccttgtaggtgtattcacccgatttggcatccttcttgatggtcacgggcagacggttcgagacgacgatgagcctgggaggttctccctctttacgttcaggagcggtgaacgtcatggttccgagtgtttctttcgtgcgaggtgaacgagagctgtgaggatggaaagatgattatggaggagtcgtggtctagatttgacagctgactgaagagagaggtggagatctgttgcgcaggtcaatggaagtttgaccgttgtgcattccgttcgaaataatcagacttgggtacaggtgagtgtgggatgtttgtgtctctgtgggcgtttctgcccagccctgcccctgccctgcctcaccttcctggaatctctctctctctctctcgctcgctcgcgcgcggaacgggccgaggcgacaaacaaggggcggggcaggcaggagagggagagagcagcgagagaaacgccaccaccgtcaggcaaaaccgaatccagtctctaggcgagcagagcgtttaggatgatgtgatggttgacatcagcagcaaattcagccaaccatcatcatcagcatcagccgaaatttctctgtaacgacgggcacacgaacagctcagggatcttcactcttgcttggtcgtgtgactacgaacggtcgatatagaatcccatcgcccatcgaccaccctagaagttgatccgcgtcggagacggagatgggtggatctcgcgcgcggactaccaacaacgacagcccagggaaagacctcgggcgtttgggagggagggcggtaagcgggtgcagcggcgtttcgacagaggcataggcatggatatccaaccgatcatcccgggtctcccaaaccaaagagtgtaacgtcaacggacaacgtgtcttgaaaggaaatgggttctctcgtagaacgatcattgccgagacccgggcggggaccgtccaaaggatccctcctttggtaaagcaaagaaacgaaagaagaagccgccaaggcgatcgaccaggtagatgtgctactgtatatccaactcttgtcgaatccgcagtcacgtgccagaatatcaattgtttcatgtatgcatgtgatctcgatctcttttatcgatttcaaacgacgtcgtgcgaaatgtacggccagctcctagtccatgcgcgaactcgtctctctccctctctctctctctctctttgccctccaagccattccccatggacctcgtcgtcgtccccgctcatatcttgcccctcaacaagttttggatcatcgcccgacccgtcaaataggccgtcttgtaaaacgacccaatgtccaacgtggagaatacggtatccgccaatccaaaggggagcatcagggggatccagcctgtcggcgcggaaagaggggtgagcttgcatacagcctcgagcaaacccgacgacgacgatgacgatgacgtaccttgagcgtactcgagcgcccacgtttcagcctcgatcttgtactgcttgacatccccacgtcgcatatgatgcacagacccggccggataaacctacgcgtgtgccgcatcatgaagcgcactcgtcagtaccgcgtcataaaaatcggggagattttacgtcccggacgatgggatcaaaacatacctcgggctccaactcgccgggaaggtaggcggtctgtactcccttgaggatgtggaaatagtcgtccgcggtgtgacgtccagagtgcccttccgtcccgacggccgaaccgaagatgatcaggtatctacccgatccagcagggtgcggggaagggaagatgtcatcccggtcagcccatcccgtaccgaccgcgctcgccgtcaaactcactcggtgatcgaagcgtggatgatatacatgctccccatcgcgcccccagcattattccagacccactcgtcccggttcgtgaaatccgtctgtacctgggtgttagggtaagccaccttgatccgctcgagcaaatcggtcaggaggacggtcgtgttcagccgatcgacggggaggtcgtgcagggtcgtttggtggtcgagggtctcctgtacgatccccgccaagcccgaaggggtgaaatggtagaaccggggctacggtacgcacgagatcgggttggagaagtcatcagcctatggtcccacccttgtctcttcgaaggggcccgaccagtgccgactcaccccgaccttgtccaaccagagagcgagcgccgtaaagatggcgataaagatcccgatcccgggtagggacaaccagcgggacttggtatgatggacttgttgccgggtgtaccggacgggttgacgcttgccggccatttttacgtgagagcgtgcggtcgagtgagcgtgtgggcgtaaagctgagagaggagagaaatcgaaaatgtctgggcgggtgctgagcggtgggccaagcgaaaacaggtaaaaacggatcagtcgatggtctctgcttgtatattattgtggttgtagatccggggttgatgatgaaactctgtcgatattcggagtgcagcgtttccatgtgatcggccaggcaacatcgtacgatccctctccgcctcggtcgtctaagcgcccaaccgtccgctctgttccatttcggatttacgagcgaggagctatctgatcttggcagaggtttcggggtatgtggtattggtagttcgaaaggccgtcatgctgtcatggatatatcctcgccatgcgttccggcagatacgctggtgtaaagcggaattgcgtgtgctccgggtttgtcctagtccaagagttccaccgttctccggtggtgatataatccacgccatatggaatctagatactcactcaaagaattattgaaaagtcctgcgacgttttgcggtggtaggtctcaaacgaaaagagctgtgccgagggtcgacaacggcatcgacatcgagatcaggtcgtctgacgcctttgaggaacgcggacgcgagctactcaccgtgaatgtttccccgtaagcagcagtccgttttgatccaaacaagaaatgccaggagaagagaggcgttgggagagattatgtagagaacgaagacgagtgccaagattgttactgtccaagactgttgttgttttccttttctcaacgttgagcgacccgggatggcatcgttcgatctttggtcggtggggtcaactcggttaattgacgcgggaacaaaaagatgggccacatgattttgaatatgcgatatttgagaaggtccagtaccggtgttggtggacccatcagcctcggtctagatctagatgcaattagatgacggtgctgcgtctgatcctcaatgtgtatgacctcgagagttggaaaactcacactcatagaattcatagcatcatatagaccacaaacctggatcagaagttgataacctgaccttgaaaagcccccgagaggaaccaccttgaacacagagtagatcatctcgcatactcgtcaagcatttaatctcggacgacccagtcgcatagcggacaatggtggtctgtcaattctacctcagagggtgagtcgacgcagatcaccccgaagtctcccaatctgtattgaaggagaccctgtgtagacaatgccgatacggctcgtcctgtcacaatgaccatccccaaggcatggaaggctctcaacgaccaggcggcgctgcaccttcagctgggaacaggccattcggtagtaagctcgaccgatctagaaacctacacgctgtccttaccgactcgtcctacatgtggcttagcttcggcattcggagctcgcccgggtggatttggaagtacgagcagtttcgggaatgcagcagccgggtcgagcgcacctaaccccgctgcgcaagtggcaccgggtagcgtggtaacgtgagtgcatcctcgtcatcctctcctattcatcgagaccttcatacttaccttgtccgtccgctcgtgctctgacgactaaatttgacagtcgcgacgtcttcctggctgatcttcaacgggaaaaaccggcctggccgttgacgtcttacggtcaaaaggaggacccttgtttgttggccgggctggacgtctcgcccgaagagatgagatggaaagccatggaagcgcagatgagaggagatatgaacgcctatgtaagccagaaaggtcgctcagagctcgtagactgattgctcgaggaattggctgacgcgaggacgggtagattgcagaggagcaacaacttatcgccaacgccaacaatcaatacgctcaggtgctcaacaatatggacgcggccatccagcagagcgagcagattcggtccaatagattgagtcaggctgcatctacgtctttgtcgatgccgacatccgcaccatctgcattcgggcaaccagcagcacccgctgcgacttcggctttcggagcaccagctgcgtttggacaatcggcagggacgtccgcgttcggtcaatctgggtttggtgctgcttcggggagcaacacgggcgcttttggagccaaaagtccgttcggggcgacagcaacgggaggtagcgcttttgggacgagcgctttcggacagtcgcccgtcgctgttgcatcgccctctacggcgaccacgacgggagcctttgggtcgagcgctttcggcgcaaaacccgccgggtccgcattcggttcgtctagcttcgggagtcctgcagcgacgacgacgacaacgacaatgggaggagcgttcggacagtctgggttcggagccgctcccacaccggcaccggcagcgacgggtgccttcggtcagagcgcattcgggtcgacgagtcaagcggcgggagggagcgctttcggatcagcctcagcgtttggcgccaagccggccgggacgccagcatttggagcgagttcaccaacggcgaacacgaacgcgggaagtgggttcggtcagagcgctttcggggcagcatccaaaccggccggggcgtttgggtcgagtaggtttgggcagagcgcctttgggcaaccagcagcgccgaccgcgagcgcttttggaggagcttcgccgttcggtcagcctgctgtgactgcaccgtcggctttcggcgcggcgtcgccctttggaggcgctgctgcgcctaataacaatccggcggcatcacctttcggggccgctgctcagacgaacacgacggctcctgcccccgctgcaggaggattcgggcagagcgcgtttggctcggcaccagcatcgacatcacagcctacatcggcgtttggatcgtctgcatttacgaacccgagtcaaaccactacgacaacacccgcgaccggagctttcggacaacctgcagtctcggcgttcggatcgaccacgccattcggagctgcagctccgagccctgctgtggctgctgccagtcctggagcatttgggcaggcagctactccttctgcctttggctcgacaagcgcgttcggtcaaaacgctcccattccgaccacagcgccatctgcctttgggtctacatccgcattcggacaggctgctacgccttcggcctttggatccacggcaccggcacctacctcgaacacgggcgggatctttgcctcggtccccacagcgacgaccggatcgaacacgacggcggcattctccgggccagctcaacgaggagagacggtatgggatcatcttttgaaatcactagagactttgcctgaactcgtgaaaaaggcgttcgaggcggacaagtttgagatcggggcgataccccttcagccacctcctttggattgtagatagacatcgaatgccgctcggcgtgcatcggattatgacatgaagaatctacctatacacgcggtgtatgaagcaagggcggtacgtgatgggaagcagcctagagctgggaggcacgagtgagaggcaaagatcgtcgttagcgtgcgaggatcgaagtgcactggcgggggaaagattcagcacatgggtatcgcggtatggcggatcgaccctgaacctaccacgctgaacggcgagttcacgccctcttgctcttggacccccagacgcgtcgtttctggaccaggccttcctcgacctcgatcatcctcttggcaggcctgttctcgctaaccaagcgctccaacctagatttgtggtcgtggttccagcgatggtgtcccggtcggggagagggcgagggagatgcccgagggtgagaacgggcttgatggggaaccggtggggacgcgttgtatccgttgaaagcggggtcggcgaggacgacttgaaataggacgaccagggtgatcgcaaaggtagtgaaaaggctacaataaaggcatctcagtcgcaatcgccgtcgtaaaggtcactcgcacaacatacctgaacttcattgtgcaaaagtattcgctaggtaagaggtaaagtttgaggcgcttaggacaaggtttgatggcggaataacgagtgacgagggtttggcgtaacgagcgtagtattgaacgggttcaacggcaaatgaatgcgaatatagactgagcgagcgatgataagagggaagagggaacttctaagtagagcgtgatcggtgaagctcgtcgataccctgtttgtttgtatatactcagcgaatttgatgacggtcgtcgaaaaaggcagtcgcacgtcgatcgaaaagtcttcacatgggaacgcgcgcgggcagtttcgggaaagaacaccgaaacgtttcacgacgtgatccgcgccatcgttccccgtggccttgtaaacgtgcagccagagcgtgggtgcgatttttgtgctgcggaatggccggtggtgattgacgacatgatcacgtctttcagcgggggttggcacaagaagagcgcacggagaaacgacgcgcgaaagcgattcacgcggtggcgtcggcgtggaagtttcgaatcgcgtttcatgcgaccgcgctcgttgatcagcttggcggcaggagcacggcatgaaaaaacgttcggcttccgagaaacacgatgttcttgacaagtcgattccacgtgaaaatcagaagagaccagaggatgtccttgtaatgatgagacttatcgatataattcggtaccgcataaataggcaagatacattcgttggttgacatatcacggcataggtcgataaactcgctacaatcccttcatcaattcgtcaatatcctgctgtcgttccaaaagttcttccttgaactcttgcaggatatcggtcaacgagtccagagattctttctggtcaatattgacgaggttttccctgatgaaattgatggactgctccatcttcctgatgaaccggcggcggagtctaggtgtgtctcacgacttgccctagtaaccggcagccggagatccgccagaggctccggccgaggtgccagttctcgctgagcctctggcaggtgcctggattgagactgagttgccgcagaaagaggaaccgccaaggcagctgggggctctttgttgacaaaactgcaagcctttctcatcaaggtacaacagatgcactacctaccagctccccaagacaagcagggcagcttctgcatccctgaacgggtccgtgggtctttccagagtatgcatctgatgcatcgatctagtccagtgaaaagcttgagcctgggatcaaggacgacctggtaaatacgctgggacacatacatcgttgttatcagtacggctcaacactaataatggattgttcttacttgctcaaagtaagacagatctttcccctctgccgctttcttgatttcttgtctgactgccgaaatgaggtcttgaccgtagcccgtctgcctgatgtaccttggcagcggggtgacctttgagtcatcttgcttcttgcgacccttggcgactttgattgattcggcaggctcgactgatttggcagattcggcagattcgaccgattcggcaggttcagcagaatcactcaaccaacgagagccggcagtagcccgataaagagccgagatggctgatccagcttgagctttggccttccttgagcgtctggggatctggtcggcggagtcactgctagaatcggcatcagagatcagagatcagattaatggatcgctctaaacgatcaaatcattcggctcgtcaccccagaaatcgtgatcaaagcttccggtatccccatcctttgaatcgcgaatcttcctttgacgccatgatggatatcacgaaggggctcccagtttgactggcagctgcatcgaattttccagccagaccgtgtaccacggatcatcatcaagcaccaaggctagaagcttgatcatacaaaaagatcggatctacccggtgaaacgcgtctcgtttcgctatgaatagtactttacaactgacagacgaattttagcattcgaccttcgccgtatctgaagcaagcggtcaatgaatctcattcaaaagctgccccgcggtctcacgaagcccctctacttcttcgataatctttttcaacaggtccggcagattggcaacatccctcccaccgacaggacggacctcgggctggacttctttaaggaacgccacggcagatcctatttggcgccacaagctgtttcgatgtcgccgaacgtctgcgatagactgttcgagactgtggtttgccgagatgactgtgtgggttccaaccgtagacgtagaggcagcagcagacgtcggattcggtcgaggcagttccgcctccaaccgcttggtagtatgcgtgtccatcatggtgacagccggtctgctgtctcgcatccctaaaatttcgggcgaaatcttgccgcttcctttccgcctgatgccaagtacatggctgcatctggtaccagcgaaactacacgggatgcacggccgcccgatcaaacccagacaaggtagccactgcctgcccggcggttggacgccttcgcggtattttgcaaagaatcgcagcgttcgcattgatcgtttcccttgaagtgcttaaaggccgagtggaagatgttcttatagatcctctgtaaaaatgccaagatacttcagctttgatctttcggaggcgcacgacccgcgctgagatttcttactctgtcccgttcagtgaaaggcttccagccagcatctctgatttgttgcctgaggacgacaaccgcgtcgtcttccgggcgtaggagaggtatgcatttgagaagctcgcctggaccagttcccgaggttgatgcgtctgcaatatcgcggccatagcccccgcgcacgaggccaagatgcacatcatctccatgatgatccgggtctgggctgttcatcgccagtgtagtgccttgcaaccattcagaagtcgtagtgatatcgatcagcactctgatcgatgccccggctctctcctttgctgcccgatcgagtctgtggtctgtgaccgggttgttcgcatgagcgatggctctagagtcttcgtgcggcgacggtctcattccgtgagccttctctcgaacggattcgtaatcaagtatgtgtacgttagaatagacattccacaaggcaaaaggactgatttactcggcgacttacagattccaggttgtaactatcatcacgacgggccgccttccaaccatctccctccccctcgttatcgggatgctttctcttcttttcgaggggcaagtcttgctcgctctgaaccggctgagattggatcgggactgtcgcctccagtgacatctccttcttgagtagccatgttgatatgacgatgcgtcgaggctaaacgctctgttgctgcaatctgagcatagcaagggcaaacatagaagacacctgaatctttgtcgggaggtggatccagcctttgatacaatcttaaagtagtcgtagtataatccttatcgagctcgtcgaactagcatgccagcaccagcttcctactcgcgaaccaaatttttgagcatctctttaagaaccctcatctctctcctgactccctccaacgtctcttcgatgagctccggcaactgttcactgtcttcagtgatctcgagtcccctgcacggatcgtgcatcgagcccagggagtgcttcaactgcttgacaaaagtctttttttgccggccgaggcgtccgccaagatccttttgctagccgcttcagtggtgctgatggcgatgctagtgactagagttcccttccgagcggtgggaatcgcttcgacgctaacagggattgcgggagcgatcgagtgtgcagagccgggcgccgaggagatggtctggccaggctcgaccttgagaattacgatatccgaggtagcgctagtcgatccaatggtggtgggcgaaggagaatcgtttcccccttcctcggtagcagcagtggagaccttggcctgttgttgcttggagctacagctagcctggctcaacaagcagaaagcgcagcgagtatcctcgagcgagatgcatgaaaagtttcgtagaccagggggaggttcatgagtgttggtatactgtatgtagtgtccacagcggtcattgccaaagtgaactctcgctgcagcgtcatcgatgattttcatagcacgctgaaaaggtgtctcattttagcttccagctctcgacgggtgatggagtggcaatcagacgagagttatcgttggatggggggggatattgccggatggagatactgtacacaaaccgatatggggtaggctcctctacttctaaaatactgagcacacttatgtcgcgccttagcaagaagactttctcctgaaccaggttcgtcgatcaaccttgttagaaggcgcgtagaactgttgacagtactgtaaaatttcgttagcgaaccgctgtcttgaaggaaatccctgccagaacatttaccgcgatggaataggcttgatgaccctgagggtgacgggaattgttaatcgagagtgaatggaggccgaggctttggaattggcagatcgaccggggtattcggttctactagcatcctgatcctcgccatcctcaagcgcgtcctgtcgatccttaggatcgatttcgacctggccatcgcgaagactcggcgcgagttgagactgatcggactccatctcctcttcttccgcgtcccgttttctttttgtccggcaaggatggcaacctgctgctcgcagcggtcctgcaacgaatcgaacgaggatgccgcagatatttccgagcggacgctttgctccagctgaggtgagggggaaggctccatctggccggtgacgctattcggatccggatggccgagagcacgaaggagcgcttaaatcgtgccgtggtcacttccatggtataaccaaagtctgtttcgacgtggtcagtttggtatacgggggtgacatcgaccacggcgtataacctactgaaatcgggtatagtagcgtcgcggatcttcgagtgcgctttcagacctaggacatggcccttcccgccgagatttagcagtaacaaacttgaagtactacactgaccacttctacatgatcttgaaggtagtcagatctggaatcttctagctggtgaagcggtcaagatgaaaggtcccaagggtcactcctccctgacacgacgcgactctctcactcgcaccttcccgatccggcaaaaccatcaggacccacctggatcgagtttccatcatcatgtcaaacgactcgtcaccctgagaatccttctgccgatctcaatcttcctttaaggtcgtcgcaaacaacaggcgatggaaggtctcgtccaacctgaaacccagatgtcatcatcaatgtcgaagcgcgcgatggtccctcttcttcctgcctgcgcggctgatggagggaaagccaccggtacctcccgaacgaccacaacatgtttctgtttggcttcttgatcagttcgaactgaaatgagcatcatcaccgttgcgcacgatccaacttgtgacattgctcgttctctgatagtggctctaaggctctgcttgttttacatttataacgacgtcgctaacacgcaagggatcagctgatacgatgggccgagtcgctctagggggccagcacagatatcctgatatcccgtccagatcgaccaccaaacgaaaatgttgttgactcttttggtcttgacgaccattacgaacccaaactcaagctcctgggcgtatcacctccgccgacccccctacacatacatcctttccatcccttgtcgtccctgatcgtcgtcccgtcctcccccaaaccactaacatcccccccaaacgtctcgcttgtcgttctgatacgaccatcgttctatcgctccgggactatttcctcgggcatgtgacgtttcctcaagaccgaaaggacccttgccgccaggacccacctcgcctggaacagacggaacctcgtagcgagtgccgaacggatccgaggtgaaatcgatgggggtgacgtgtgatgctggggttagcgacaagcgacaagagggcgagctcggcaagtttaagtttctcatttgctgtgtttgctgtgtatcgatgaaacttggcgtaagcgagcgcaggggaaagaaaaagaatatgcttggctttgtgtgacagtgtctctaaagaaaggtagagcgtggcccatcatggcatgcatggcacgactgatagtagacggggagaccatggtcgagtctgtgttgtctatccccatccgtcgtagatttcagcaaacatgaccacattctcttcggagccgtattccgcaactcatgtacctgacgagccgcacagacctcgagaaagaagccaaaggatggatggatgaaagtggaagcgagtcgggaaccgtcgttggcgtctcgctccctcgctcgtttacgcctcgatgatgatccactatttggcgcagatcgcgagacgttttagattctcgaccttgatggaacctggtcgtcgatggcgtttctgaccgtctcacccttgcacgaatcggggttgtttccattcgataaggtcacgtcgaacgtggatcatgaacgatccagggcacctggcgaggagcgaggaggggtaaatcccggagtattccgcctcggatgcgtcgagcttgtgtaactgtatcgcttgctccggaaattaatctttcaaggtgtacgacatggtttctggcagaggaggaagcgaggacgcacactgggagagggaggacatcgaggtggatttcgattcagtatctgttgtgatattgagatccgtgtggatcgaatcgaatcgaatcgaattcatttcatttggctgctcacgagggcaaaacaaatctcgtctcgtctacgatcccagcattcctgccgattcatataagtaatcgtcagtcgaatgacaaggttgcatcccgatggagtgtgggtgacaaccctctccccatcaatcttcatgtctgtaaccacctggaaggacattttacacagttagagaacacggctagtcaccaagccagagctatctggggtaaaatcaaaaggttcgtggcatgaagccacagcgaggtcgacagtagattaacgattgcgactgtatgtacattgggacatgtagcgatacacaaccgattcacagaaagttgacaggtcattcaatgctggtcacgaaccagataccgggcagcaggacgctcgctcgtcctgttgaaatggaaatcacgttcctttcgtcctcgtctggacacaatctcgaccttcacaccatcctggctcaacctcaatcacagtcccacgccaccattccgcccggagcgagcgtctacgtccccgatgcgtatcgacagaacgttcgctcggcctatacgacccccgcatcaggtatccagcccatcgaccaggctttagggtctatccactcgacatcagcttgcagtagcgggactgcaccttctcttttgttgcaaccgccgcactggctcattcgaccccaatcgatggcacaaccgattcacgctccgatccaacttcgccgcaggcagaccactcgaccgacttctactcgaccgacccacaggtacacgaccctgcaaaagtccaactcgtttccctatccgatcacgttcctcctctctcagccgcaggttcacaagccgcagacctactccgacaattatggtgggatcgtatcgatcgagtcggccgtcccagaaaatccttaccggttcacccttccttccgggctagatttgggcggtcatgtcgatggcggtgcatcggtcaaccaatacattcgatggaattcggctctcatgaatcaaggaggcagcacgacggtagcttggagctcggcacaaggacttgggcaagcttgggttgcagataagaccaagcacggacgagtgaggggaagtcatctcgatcgtcaaacggctcggaatgctcaacggacgacgtcccaaagcgagcagactcgacaacagagagcgcaaccgtgtcaacaagagcaagttcagcaatctcagtcttataggtatagacataccgccctgctacctacgttgcaacaacctcagcgataccagccgtatcccgtgcggaatgcctgctcgaccacgccgtcgacgtacatcgatcccgctcctacgaacgaagctatatctgccatggaacaatctaagcacaccatacctatcgaaaacaacagtgcagacgaaacgacactgcccgagatcaatttcgagatggacgcagagatcgacctggagtatgacctcggcgagttgtcgggaatggacgagctcctgaaccgcacgatcgtaccgatgaacgcatccatgcatgacaatccgaatcctttgcccgcgctcatcggagccgagattccacgcagatcgagcgagagtgatacttccgagaacctggtgagcaggagtctcgttccgaactcgacgcgtaaaactctcatcgatgtcgacgccgctcgcgtttcacttgcgcctaaggttcgacccagaccacagtgcggacccatcttgatcggcaacttgtcgcccatcccgaatcgtgagcaaagttccacttcggcgaacatgatggttgaggtccaaccggtcgagacgatatcggagccagaagtcaataccagtcaatcccctttcgaaagcgatgacccggcagcactgccaaccaaatacaacactttcccggttgctaaacatcgtggacgcttatcgatcaattcaattcatactgcggtgaaaggatggtccgataaatgggagaggataggccggaccgaaatgtcttccctcaaggcctatcctcgagtgaacgacgaatctggcgaggtatcaatggtcgtcagcaccaagcctcccgccgagcgtcttgtctcggatgtagtgaccttttcgcgccgccggtctcccgcttccccctcgacctggatcgctggcgagaccgtcgatttgactatgactcctgttcaagatgtagcctctcaaagtccgactgaattgaccggacggatgaagtacgccagcctgactacgccacctggccaatccgagatcgtcttgcgagccatgcttcatcacctcgagacgtgggatggagagccgccaatgaccccagaagagactcgagcgatcaaagtcatgtggcgagacaatttggataaacgcaagtggcatacgatgtaccgggtgagtgatcccatcttgccaagcaacggcaagtagctcacgcgtcgccctgtctagcccgcctacaccttcgttaatacctggaagacggcgttcgtgcctccttcaaagcaatgcacttgctgcgcctcgccgaaagatctaggatctgcaccactgcttccggctttggcggaatcatcccgagccttgaagagcaaatggccctgtctcgtcctgatggaggaatacgggtcggagctcccgattacaatgaccatgtcgcgcgggacatgtctttcttgtatgatgcgcaagacgaaatgctcattcatcgatcaaccagtggaaggactacccgtcagcatcgattcggcacctcccaacgctcctggtaccaaatcgatcctcgccacttctacgccagtctcggtaggcaatccaaaggtcaggaagagccggacgccgagcgtgacgaagcctcgcggacggcctaggttagtgccgccgacaccagatgaccgcagcaaacgaaggaaacgtactgctcctcgaactactcctggttcgagccctcaacgatctccaaccagcccggatgaccgcacaaccactccgtaaacaagcgtttcccttgcggaagcaatgaccaaagcgacttgcttccggggctttcctctttccgcttgagcgatcgaagcaaatgacaagtaaccaagaacggactcaactcgttgtcgacaagagcaacgagaccttatgatgaccttcattttgttgtatgtaccgatctatgcagatgctctcatcctaaagcttttcgagccaccgtgcaaacactacgatagatcgataatgactacatcacaatacctttcggacctgagctattgatgacgacactggtcggcgtcatccttccgcgagtcgaaaacctcgaagaatattcgtacgagcctctacctttacacccacctccgaaacgtcggagagactggatcccgggtgttatcacaggaaacgatgccattcgtctccttaataaagcaatacaggaggcggaagagtcctccggttcatcccggcgttcccccatcgctgaatcttctgaagacttcgaccaagaagcagcagagtggaggagtagcttcgcgcaaactatcgagagctacggaacttgggcgaagatcacagaccccgttgggttcgctcatcgtcgagctatctcggcggttcgaaaagaacgaacgcgatcttcgaagatcttgaatcatggattgtcactattattgatgggtgctacctacagcgtcgagaatctgtaccacgtcagccctcgagccagagacgcggctgaattcgttgggtccgttcaaaatcaatgatcccagttcggactcggttgtgatattcaggaaccgcttgatgctaatttaacaagcacatgagatcatcagtcatttccctttgccataccgtcgtctcgaactcacaaatccccgtcgatgaatcccaaggccggtcgaggtttggcattaccctccgcgtgaatctctctgtaacgagaccacgggatttccggtcccgtcacgagactctccatattgagctgaagttcacgcagagtcttggcttccgcctcgttcagattgccaatcactccaagacgacccgatgaagtagcaaagaccagttctggctgaagacagaggctttcctgggccgaaaccaacgagcctgtcacgatcgacgatgttcagcttgtatcacaaggccggccttgaatcgacttacctcgctgcattcttgtgatggtctcgtgaagagccaagcccgccgaattctcgaatttgttgtccttgtgccgtatagttaacaagttgtagttggtctgattgtgtgaaaaagctcgcctgagtcgttgtaacctactcggactatcgcataacccatatcgcatcactcacgtctgaaaacgctacggcgccgccatcggcactcagttcctccatagtcaaaacccaatgaggtcgcatatctcggcccacgtcgacgagttgccccctgccatcctgctcgagtgcgaaaacgctacgcataccgtcgccgacatgcagtcgttgctttgagccatcttccaacgtctgtaccgtcagacaagatgcgaagaaagcattcccccatgacgcagtcgtctcgagcggcttcgtcaagtcaaagcgaacgagatcgacctgtaagaaagtcagtatcgtcagtgtaatgcaaccgtaccgttagtcacacggatactgactcgatgatcgacagcgactgctagcgcgccccaaatgaccttcacatcgtacaccgtcccgttcatttgtttgctcgcaacaacttcggctgacggcggtcgccctgatgactcgtcgaccttgacagaaatgatacgtagataaccggagttcgaagccccggcatcgtccggccgatcttcgaacgttgtgcccaaggcaaaatgctgcacacccgcatcaccaatctgcaccagactcagcgaggtgggcctctcgccatcatctaatgcgatttcgctcgaagctgcaagtcctgcgtgagcgaaatgtaccgtacgctgtgctgcatatcggcttacgggtgaatgtctgatcatcgtatagacggaagcaactggatgtccgttcgtcgccgtactcttggtcgatcttggtccgtgtaatcgttacgccaaaaacgcgcgagcttgacgagtgaacgacgtgttgaggattgtcgaagccgagatcgatctatgaatttgctcgtcaatcgcttgtcttccaataccaagggccgaggaacgtactttgcggatctgtagttccctcagactggtcacagctcggatctccagcccatcaccgtctgcaagtataacgcaagaaccccagttcggcagatgtaacatggcggccgaagagatgccctgggtgacgcgagatcaggactagcttctacgcggtgctgatttcatgagactcacagataggttcagtgccgatcgtgaaagcctctcctgctcctcgtacaggatggaaactctgtcactcagacagagaacctgagatgcttgcgcattgaacgaagacgccaccagttgcaccggagtctttcccatagccaagacgtttctctctccgattgacagcaaagggtcctcgaaacgaagcgtccgagtagtgacagacccatcgccattaccaacgaggagtgacaagctgtcatcggcggtatcggcaggatccggtcgaatcacgatggagcgaggtaatgatgcctctacaatggtctcgattacctgcaggtcactagacgagacgatcttgatctcgttactgccccacagtcctaccgccgccagcggaatccccgacggtgcaagcgctacactggcgatttcactttctgcaaatttgatgcgcctagaaaggaaatgctcagccgaggcataccgagccaaatgctctcatgtctcgactcacttgaccacattgacgcacgaacctgcaccagagatctcaattcggagagatatgagatttccgccggataggccaagcaacaagttcctatccacgcaagccgcaactatcacagtttcgtccattgcaagatccgtccatgttgtggatatagcaccctgaatgggatcaatgacgaagacgccatggggagtgacctgaacgagatggttcaagacctggccggccgcaagcgttcgttcgttggcttcgtatgggattttctcgggcgagataggctcgacgccaagatcccattctcccgccagattcacggcagatacgtgaagcagcaggctgtcgtccaggttggacaccagtataccggttctattgaaagcgcgtgcttagcaatgaatcggcggcggggtcaatttcttcttacttacgtgggtccaaggtcaaatgtcgaaatcgagacgatgtttgcgagaccctcgagcctggcaatgacatcagatgcaattccacttcgtatcgctctcaaggatcctgacgatgccagacctgaagccgtcacaacttgggcctgggtgaagcgatacgatcagcgggtgttcaatacccgatcgtgtgggaatcggctcacgctaccaccgccttccccctcgactacgcagaagtcgagcacaggagcgatattcgcccatgaatcgactgttgttagggcgctccgctgatcgttaagcgatagattttttaggtcaccgtcttcctcctcgatctgcgttagatctgtggccttccgttttcccttggaatggaagatatggtccgcatgcagccggatcatctgacaatcgccgcactgtgatccgacaaagatgtgaccattatcgaggtacgacagagtgctagcgggggagacctgcattgataagaaacagctggtcagctgtgacgaagcgagctccagcgagttccagcgtgagactcacgacacccagattacgcatgatcggcttgctcggaccgtcattcgatgcagatgcgacgagcgagagccttcccgcggcgtctccgagcagtacgatgtcacgaccgtctgcttcgatactcgtagccctacagacgatagtacacgttcacgtcaacattgtagaccggagtggaaacgctcgagcggaacctgaacatacgcagtaacctcgccaaatccttggcggatcctccatcctttagcccatatagtcgagttctccgtattcttctcgccagctgcgccctgatggtatgttccaccgatactgccctttcttcgcttgctgttgtcgggactcgtactgagagcgctctcgctgacctcgacttttggcgactccaagtttctggccgacaagctgctcttccttcggttggccttgacgagctgataagtcgcagagaattcatctccgatgaccagtactccgccaggtacggctaaaagtcgcttagcagccgggacagagaaatctttgacgcccccagttccgggagcaggggtggcatagggaggcgagaggatatcgatcgtctcgcatacatcgacgaatgcgcgaccagggcgatcgagggtccgcgccacaaggttgatggtatagtccggcgtcaggtaaagaagggctagtgtcgagtttgtgcgtggtgacgctggtccagtgatgaaagctaatgacaacagattgtgctcccgaatactggtgcgcaggtacgcctcggagttagtcaagtcctctttctcaaatgatccttactcacttgatttcgtatacatccttgatatcgagtacatctccatgatcttcatcgatctccatcttcgagtcaccggtatctttcctctcgcgtttcttcccctttcccacggtactcgcccttctggctcctttgaccggcgaatccttgtctttcacaccgatttcgatgatgcttagcatgccaacgtacagactggcaacgacgattccagccgatcgatcgacgactaagccggtaagaaactcggccgttcgactgcgtcgatccacccattgtgaggcggtcagatcaagtgcaggtctttcggtatgaagatagcggtaaagcaggatacgagacagaggatggtcagtctgcacaacgatgtgagggctttgaccctgtttcccggtgcaagagcttagtatcgtagcataatcgcaagtggacctgcggaacccacaggcttgccaacccattccagtccgacaacgattccccatacgtcggtcttgcagacctcgaccagtccttcagggttcaggttccagacttcgatcgtattgcctttcgcgacgaccagggagctcgatccagactccaaagatgtcaagtttggtacattgatggaatgcgtgacagccgtggaaggcagggcctaggtcggtgacgacgatgatcagatcgagcatcaactcggccggggatcggaaagagtagctcaccgtggcgacgtaaagcatgttgcctgaacgtgtctcgtcacatgcaacgccttctaattagatagcgaagttgaccagaaagtatggtttgctgtctctgaagcccaagccgatgtcttgtgattcgtctggatgattgtgatctagtagcagaccagcagatcgatgaccgttcgaacctgacctgacgtatccgggattaggtgcccttcgagagtggaggccgcccacgatcgatggcgacgcgcaagtccgaagatgccgtctccacacaaggccttgcaaaacgtcgtatatagttgcgtggatgacatgaaacatacggtggtcgtgttacatatcgtcgtggagataccctgctaccgtaggaacggcgactagaacaggcgatacaaataacccgagagggaaaactatgaacaagcggtcgtaacacatcgtagccgagtcgtgtctcgctcagaggcggaataagaattgcatgtcctgcacagagacgagtcacggatcagcattgaaagacacctcgagacctcaggcgattcttacctcttcagtgagctttccgagagcagagtcgggatcggtagcgagagcagcctgcacagtgaacggtcaaatcaattggtcgaacaaaattagagctcaaccggttcgcttacctgcgtcatggccagctttttatcttgcagctgcaggatcttggcttcaatgctgtcttctacaacaagctttgtgacctggacggggcggtgttgaccgagacctataccgacggtaagttagcgtatgcgaccctcctacaatgtttcccccaggacatacgatgaatacggtccatactgtgggaagcggccgaggtcagcttacggagctgcggccaaatatagacgaaagcttacgattgatattcaacggaggggttccaccaggagtcaagcaagaacacctaatagtcaacagtaagcgacgttgacctcacggtagaaacccgatatcaactctgatcgcatacctgagaagcctcggtcaaattctgacagacgagcgaaattgtaagcattctcgatcaacaaactcagccgacttaatcgaggctcaccaatgctacaccaccggcctttagactgatcaggaaaacggtgacttgagggtttttcataaagtgctgaatggtcgcatcacgagcttgcggcgacattccaccttccaatcggcaaatgttgaacccggccctctgcagacgaaaggcggcgagatccagcatcgagacgaattgcgagaagaccagcgacttgatgttacaatctttgtcgcgcaactcgcaaagctcgtccactagcatttcgagtttagtggaagatcgccagttctaatgataaacgattattagcctaaggactcaaccgcgaccgcgtatcaatgcgacttaccgacaagtccaatcgtcctagaattccctgctttttcatcttctttgcctctcccgactcaaccgcttcggcttgcaagtcgatcgtcaactcgatgtgacagaccggacaaacggggatggcggtctcttcatgtccgagcatatactgcgtaatgcattcacgatcgaatagatggttgcacttcgagacgattgcgtcttcggcctaatcgcgatgcaagtgctcagctacgggtaaatccctctggtccgtgtgatgtcactcacagtatcgtgacaaagcctgcacaccgcttcttcctcagtctgtacataggtcgaggtcttggatctcaagaccaagtcaggatgacaagccatttgacgcactgaggtagagatataagctattacgacccgacaagaacaatgagaagatgggcttacttcgagtgatcaatgagaagacgttcgagtagtcttggggaggaagaacttagcatcaaggtcggcaaactacgatcaaattcttgctcactgttcaggattgttccttcagcaatgtaggtggagaactgccgacgagtctcggagaacaaggacatgtagagctccctttcctcgggcgagaagtaccctcgcctgaccgtgatggttctcggaggaagtccgagatcgtctgctcgctcaatcttggtacgcctgcgtgattatgatctaatcagtcgacgtatcgtggcccccaaacgacgaatacacacctcaacatgcatcgatcaagcaggatcttgagcttcttgaaggcgtccgagccaggtccttgcattccatacttctgaatcggcgttagaatctcgttgttccaatagcatgtgtgctgcatgggcgaatggccgcaatcgtcacaatttcgcttgtttccgaattgccagtgcaacgacttgcacgggcacctcttgcagtagtaaaaggcaaaagctgaaagaggagatggcttcggcaggcgtctcgtcgaaagacaagcggatatgacttacgatccccgcccaggaatcgaacaagcgaataaagttctcctactcggttctgcaatggcgtccctgacaagcaccatctgtagctagcatcgagcgcgaaagcagccttggcagcgttcgttgagcgttccttgatgttgtgagcctcgtccaggacaactctatgatgacgatcaggagtgtaagcagaaggtgagactcgcttaagacagtcgggctcacctgtgccacttgacagcatgcatcggactcttttccttgatgagagcgtcaccccgcttgaaccctttctgctgctttcggaaggcagcctcgagggtaccataggacaccatgacctgatgagtcgggaggatggtaagctaggcaccgataatggaacgctcgcgtcacactcacgacatcgaactttttcaggtcatctgccttgagtctgcccgtgccatgccagagacacacctagcaaccgatccaaccagtgtgagcgatgaaactccgggacgaaacagactgcgtaagctcaccgtgaaaccttccgcattcttttcgatctcgtgcttccattgcatcaaagcgacgaccggtgcgacgaccaggctaggcttttttcgaggttccgacagtaacagcgcaatcgtctggatactgtaggggagagcgacatgatttgagcgtggaaggacggcgagacttaggaacctgacttacgttttcccccttaaggttcgaaagtaaagaaagagcgccagtcagtaaaggaaacccacgccaggctcgaatacagcctcgatctcacattcccactgaaggaagatgaaaagcgattcgtcagcccaagttctccgagatgccatgattagactactcactctcatcagccaacattccgcccttccagggtcccgcctcctgctgcttcatccagaacaaactctccttctggaacggcagcaacgttaatttgaggctcggatgcgcctccatggtggtgggcgccactttggtgatcccggctttcaaatctccccatacggtcgccaactcggggtgatgctatcaagttgtatagccacaggatcaggtttggcgctgaccagaccgaatccagggaatgtaggctcacataattgagtgcaatcgagttggtctcggcccaggtcaactttctcttgagggtcttcatcatctccttcttgatctgcaataacggagccgcttcctccttcctcctcttgttgtcttccgcacgtttctttctcagtccggagagatccatcgtcctgtttgaggtgctcgcaaccgagacctttctcctgctgcttccccaaggcttgacgtcttcttcctcgtcctcctcataatcgctctcaaggtcagcttcgggatcttcctcctgatcactgttaaacttgaacgaagcttccgaatccgaacctgctcgcaatcccaaccggcctgcaagtgggtgtgatacggggtcggatcagttggagagtcgagagagaatgagctgacaaggtcatgagaatcaggacctacgttcggcagctcgagctcgtttctcagattccttgttccttgccgtcggcttgctcggtcccgctcggggctgttccatcgtcatcagcgattcctgccatacgagacacgcgggttcagtctggaccatcctccgtccttccaatcatagctgaaactcacggcaatagcggccttcatcatggcctcttcgatgtcatcctcctcgatctcctggacgaccggagccttgccattgacctttttctttgcctgctttttgggtggagctcgagcgggagcctttttgatctgactggcacggggtacgaaatccaactcgtcgtcgtccccctcgaactccgcaaacgcctcgtcctcttcgctcgccgtaaaattgtcttcatcttgcgaatcggggacaatgtcggaattcggctcggactttacgtttcttctcgaagtggttcgggagggggcggatcgggatttacccttgttggtggcagtctgtcggttggaggaaaaaatcccctttttggtgatgggtgcatcgagatcgctcaattccgagtcgctcatgactgtcatgcgtatcagcgcagagtcgcccgactggtaacggtccaacggacgtaccttttcgtttcctcgaagcaaagtccttgacgatgggtttcttgtcttccaactcgtcgtcctcgtcgtcgtcgacgttgtatttcggcttggtagcgatcgctctcgaactcctctttaccggaatctcgacaatcatctcggtcttgaccgcagccaagagatcctctgtattctcgtccatatcgctcccgacgaccgtactcgccggggttaaccctgagtcgttcttcttgagagcccttcctcgagtcttggtcgtcggggtgttggttgatccgggagtgaggagaccgttgttctcgacgacatcggggatgggcgttttagcggccgcggcacgacgtcggggtggcatgctcagggattgtgccgtctactatgatgttggcttgctatgcaggcgttctggtagctcaaacactcttttaccaatcaatattctatgtgttgatgtgcagtcccacgttcgagagactggtgtcaaaagtcgttcccctggcacgtccaacttctgtcgagcgactagtcaggtagcctacaactttggtccatcgcactttgccgttatcagtggcaaacccggggaaaatgatggtggggggacgcttcctcggtgaccgaccccctccactcgagcattgggctacgcggaagcagatcaatcgatccactcccatcctatgcgctatatcacccgctcaatcgctacctttggctgccgatcgagatcaagacgatcgtcaatcgatgaattcgacacagacaaccatccaccctgactctcgttcgaaatgtcgcaatcccgcacaaacatctcatcgatctggctcgtcttgtctctttgttttgttttttcgcgtgttgagcgcattgtataaggcggtgtcatgcgaaagaagtcccgtggcaatacaaaaactatagacgcaaccttgcttccctagtctagttccggaaatctctatatacaagcaagtaaaggaaaaaggtggttgtggaaggtggtttgggatcgtcggaggccatgtcgccggcgaggacgacggccggtcccgatgatgtcgaaaggttaatagtgaaaaaagggggcaagggggggagggccgattctcgatgtacaaaggccggacccgtcgaggatgacgagtccaccttgggatcagatggatgctgatacgaaatcccgggattggttatcgatgatgatgacgatgttgatgatgatggcaatgttgttgtgagttgagaggaggggatcagacgaggaggagctcgtcaacggacgtcgattttcgtcctaacttttggcgtaagggggtcgtgtagagaagaggagaagagaaaccggaattccacatcgtcgacgcgggtcgcatcgtcgcttagagcttgagcgacttgggcttctcccaggtgtagctggggttaccaaagtgaccgtacgaggcggtcttcaagtactggggcttctggaggtcgagctccttgacaatgacaccgggcctcaagtcccagttgtttcggatgaccttgaccaagtcgaggtcggacatcttcttgccggtaccgtaggtgtcgacgtagaccgagaggggctcggcgactccgatggcgtacgagagctggacaagagctcgtcgggcgagaccggcggcgacgagggacttggcgatccatcgggcggtgtaggcggccgatcggtcgaccttggaaaagtcctttccggagaaagcaccacctccgtgagcaccccatccaccgtaggtgtcgacaatgatctttcgtccgctgcgaagtcgggggagaggatcatgtcagtcgcacactcgagcctcgtgtagagtaagaatccgtgactcacgtcaaaccggcatctccctggggtcctccgataacgaatcggcccgaaggttgaatctaggcgaggcgatatggtaggttcagcattgtttcgcattgcgaaagccgaccagcatttgaacctacgtggtagacagtcctctcgtcgagcatgtcggcgctgatgaccttcttgatgatcttctccttgatctgcttcctcaagtcctcggtggtgatctcctcggcgtgctgggtcgagatgacgatggtgtcaaccctcaaggggatgacggcaccgtcggcgtccttcttgtactcgatggtgacctgggtcttggagtcgggtcgcaaccaacccatggatccgtcacgacgggcagcggccatggcagcgttgagctgatgggcgagcatgatggtcttgggcatcaactcgggggtctcgtcggtagcgtatccgaacctgcagggcgggcgggggaatatgggtcagccatgaaatctcgaggggaacgtccacaaggtctggctggctcacatgataccctggtcaccagcaccgtggttttccaagtcaccgtggtccaaaccctgggcgatatcgggcctgtcatcggaagtccaggtcaattcaagcgctgcgttgcgttttccacaatctgagctgccgacttacgactgctgctcgatggcgaccaagacgttgcaggtcttgtagtcgaaactgcatgacatcccacttcgatgagaaaacgttctctacagcgcgttctacttcggcagaggctcaccccatctcggaagagctgtatccgatctgcttgatgcagtcacgaacgaccttctggtagtcgatctgagccttggtggtgatctcaccgaagactatatgaacccgaacacactcgatcagtaccggttctttgttcgttgggcgaaacttttctgatccccagcgccgacttacccatgatcataccggtcttggcagcggtctcacaggcgaccttggagttggggtcttcacggagacaagcatcgaggatggcgtccgagacctggtcacagatcttgtcggggtgaccctcaccgctgaatgaccacaatcgatgcgggcgcgcagagggtaggagatggacaaggatggtggatgataagagatgacagaatcagcgaactgtttgcgacagctaagcaataaaatgattcgggtaggctggacaagaacgtgcttgtcgtagacgatggggaccatgccagagtattaacttacacagactcggaggtgaacaagaagtggcctacagttaaccaatagataaggagatgcgaagtagctatgagctttctatcgccaaagtctcaagggtgacagtcaggatgcttaccctcggggaggacgtgggcagtgccgttgttctcggggtgggtgatggcagcggtcattttgataagaagtttgttttttatgaagagagaaaatggggtgagaagtcgtattctggctgtgcgagtgatctatgaagcagcgggtatcggatcaagtcgaggtatatgaggtcgatgggacgagggagagattgaggatggtgctgagggggtcgggcgttgctgggtgagctggatgctacgtggtgtggtagtgtcccgggggctggtacgatcgcgaaccagatcgaaaaagaatggtttgaatcaaaaacgtgtttttttcttcttgcgcgtcgccccagaatcccacttcccccccaattcccacttgtctctccctgtcacgccattgccgaccaaacccaagcccggggggatcgcgtcgcgtaaaccgaccgatcggatcgcgccatcgatccacctttgtcactcgagagacacgttaaacacccgcggtacgatgacatgacagcaatcccgatacacgaaattgaacatcaatccctcgtttcagaccaacaggggtacgataagcgaaacccttatgacaccgtcatctttagacccccagcttagacccttccgatcagatcggctccggagcaacagtctcaaagacccccgacatcggtacgaccctctccctcgaccctcgatcgaccacgatgttttgtccattgatcccgatagagccgggggacgagagaaagacggcgacgtcggcgacctcttcgggcggggcaaccgaggccatgaactcgggtgtgacgctcttgctcttctctgccatgatcaccatagtcggtcctaagaaattgaccattagacgaaacttcagcctcaaacgtcactaagggtgaggcgggctcagcctgaactcgcctgaaatagctccagatctcgcagcgttctccgagatagtagtggccactggcccaggactagtccatccagttcaaacgtcaatcacttctccttcgacaaaggttccgcacgacaacaagtgcactcacgcgaccccgttgacccggatggctacgttgccagccatgaactgactcgctgcgctcttgaggattccgacggctgccgccttcgaggccgtgtatgctggagaacccatgcctccgaaagttgaggccagcgaagtctacgcattcgtccagtatcatgtacacgtccccatgaggcccggtatcagcttctagccgcagaaagtcatgaatcggtctctgcttacggtgacaacgatcgaaccgcccgcttccggcttgaagagcgaagtgttcatcatgcccctcgaagcccactgaatgcagtgaaaaactccgagtgtgttgatcgagaacgctcgttgctaagggtatcagtagacttcagccggcctttcgcgtcgaacgcgggggaagtgcctcggggcgcttacgatgttctgttcggtagtcgtaccgaagggctcaaaatctaccacaccagcattggcaaactgtttgatcgcgatcagcttgctccttaatcgatcccgaaatgcccggtttgagtcgaagacttacgaaccaatccaaccttcctgcctccccgatcactttcctgatcagcccttcgacgtcctttggcttggtaacgtcgaccttgacgccgatcaccttggcttcgtacccggactgctgaacgagctcgatcaagttcgagaaatggtcctcgacgatatcacaggcatagatggtttgggctccagcggcggcatacttgaggacagcggtacgaccgatgcctgagggtgttcccgcgcctgcagggtaaggtatcaggtcggactgatgtcgtcaatcgtgctgccttgaacaattatggcggatgtcttaccggtgatgacaccaacagtgccagtgagaggagcttgagacatttgagacagttctacagcaattccttctcttatgatacgctcactcccgtctgaggggtcttgaacaaatcggttgatgagttctttccattccgcgcacaaaggacccgtggaaaccgctccatctcgcttatatatgtcttgcgaatcccactcgcctggcagcatgagcagctcgtcccttatcatcggtcatgtcgtcatagattcaccgcatttctcaggacgcacatgacgaccacacgataatcaggtaacatggtacgatacattccggcgcacagagtgggacgatggcttttgcggcttgtcccgtggaaatgatgcccgtaatcgtttcatgtcgcatgaaagtgtcgacagcccattctacgacgggacacaggacgaacgacgtgtcttgtctatcctacacgatcgacagaagatatgcaaacgtcacgtgtgccaatgcgcattcatcggtcgtcatcaaggtagtaacaggaaaaagtcgtgataaaaacaaggcctctctaggtagcttttgggggtgattgtggtccttcatagcatgcatccgtcgtctccccctcaaccttcccgtcgtcggggcgtcgatcgcaagatgttgtccacactgttggtcaaacgaatttgtcagtcgcaaggatagaaaacaggagtctggatttggtactgttacgcaccggaggatcatctcggcagcctcgctagcgctgaccacgacctgcttcttcaacttgtaactctcggtcactcccaattttcgcatcgaggcgatctctcccttgtccatgtctatgcgttcgatcggctcgcgtcagtctcaggttgcgccagtcgattacgaggccatcggtcacctacccaaaccggcatcgctctgaccctcgtaatgagcagccctcagcctggcgaccaagtcggacgaatcgtgtccaccgttatcggccaagatggtgggcatcttcaaaagagaatgatcgtcaattgccacatctcgcagatcatttccatcgagccaatcttacctgtcgcaaagcctttccaaagctctcgacggccaaagccttcttgcccttgatccgtcgtccctcctcttcgaccgcacagctcatcaacatctcggcacatccacctcccaataccactcgggtctccttgacggtctgagacagcaccgacaaggcgtcgtgcaatgatcgctcggcctcgtcgaccatttgagtagtagctcctcggagtacgacggtacaagcttcaccagcggcaacaccggagaatttgatgagctgaaaaggaggccgaaaatgttgtcagtaaacctgttcgacgtgacaagtgcccaagagccattcgcccaccttgtcctctccgatcatgatctcctcgatcagatcacaccgtccaatcttgaccagatccggctgatcaaaggtactcgcgatctctcctccggtgacaagagccaacctctcgacaccctcgaaatcggcatgctcgatactcataattccctgctcagacaacaggctctcggggtagttgtagatgagttgccggttgacgaaacaggtgattccgtgggcggcgatcttgttgaccttgtccttcattttttccttttcggcccgctcgagctcggcgagcttgcccgtaccgtcgaccttgactcgcgcaccaaagatcttgaccttgtcagtgtccatagctgcgaggcgggcgtgacatgtcagctcgtcgcttttaggcagaccagactgtttcggtcctacaggtgttggcgatcaggatcttggcattctcgatcctcttggggcagttgacgccgatctgcttgtcgaggatgaatcctgtgcgggttcgacggacggccgtcagcgaccaaatcatgcggaacgattatcgtgccacacccgccatcgctcaccttcgtccaagtacgagtctgtcaactttcctccgacctttttgatgatctgaatgtggtccagatccgtgcttcccttcaacctcaagacggcgtcgacggcgaggttggcaaagtactccttgtcctgggcgagaaccttagaggacagggtcgtccgcgcaatgttgaagagatcggttcggaaggcggacgagtcggacctgagagcaagcaagtcccccgggtaggattaggtcagtcgagggacgcaaccggaaattaggtgggggtatcacttacgagttgtccttggcggcacccgccagagcggccagactggccttgctagcgatcctgtagccctcgacgacggtctgcgggtgcaccttgtacgtggtgaccagcttctcagcctctctcagtaattcactcgcgaggacgcagaccgaggtggtcccgtcgccgacctcgtcgtcctggacctttgagatgttgaccaagatcttggcggcggggttatcgagttggatggatttgagaatggtagctccgtcgttggtgaccatgatctcgccggtggaagccgattctaaaaatcaaaccgaggttagcttcgaggggttgagcatagaatgtcgaccgggtcgagctcacgcaagatcttgttcattccctaaccgaccccaattccacgtcggaccgtatgagctcatttcccgaaatgatacttgcccgatactatgtcgctcaccttgggtcccaaggtactcttcaccaagtcacccagagccatagctcctacgaaagaagacaacctcgcattctctcctcgttcctcggtagcctcgtctgcgaaaacgttcatgatcggtcgtttgtcctttctatttggcgcttatgtcgattcgttgcaggatttgatctgctagtcgtcaatctagtttgtgttggtataagatcgaccttgaaggtgggcttgttgatcaatcagactcatattgtaaaggtcgaacgaatctctctctctctgcaggtcgctcgttgcctgaatgttccaacgaaccgaggggcgacgcgtgagaatttcgacgacgcgagaacgactcgaccgcaagactttcaagatcagcagtcatcatcgtgacggtgatatgtataacttgtgtacaggaagaccaaaaaaaaagagaacaacggtcatcgtcatggtcactacgttgactgctaccaccacgtgtggcggtgacaatctaatcctcatccatgtcttcctccaaagccctcctggcagcggcctcggcctcgaccaacaagtcttcagggacgtgcacatggaacccgttcgtctcgggtccgatccaggtcatctcgagctcaaagtttccgtccttgttatcatcgtggacgaggtgtacgctgaaaaggtatcgaaccgaggcgcaggcgtcgtcagccgtgccctttgatatgcctcgcgatcgtccttggcgactcacatcctggcgacctccttgactccctccctgacggtcatattcgatccatccaacttctccaactcggtcttggccacctgccttcccttgcccacggcacacgcccggtatccatagtacgccccgctaggctcgacgacgtagagctgaggtcccgtcttgtcgaccgcgccgacaatggtgctgatcccaaagggtcggacggaaccatacgaagtgtaggcgtgtacgtaggcgccgattcgttccatcaaggcctggaagacgatgttcagttagacgcggatgccagaaggaacagcgtgtatgttgggaagccggactgaccttgagcccgacgggactaccatatgtctctttgaagttctgagcttcctctgccgctcgtttccccagatgacgagtgtccgccacgagacccgatgcggcctggaattagtcgtttccataacaacacaagttcgaaaggccgtatatgaccggatcgagagcgatgccgttcgtcggaggaggaacaagcagattgagaacacgtagtgatcagcttgacaacccctcaagcccgttctgcgcatggcgaggaaacaatgcactcaccaaaccgacatggttatctacgctgacgatccgcttgttagcacccttgacgagcagtttcgaggtctgcactttttccacagcgaggacgactccgtctttgcatcggagaccgatggctacgctgctcagtcgtcatcagaagtcgggatgagatcagctggtgttccttgttcgaaattgagctttaaagtgtggatgtcgaggggagcggtcgatcaagggggtcacgggagtgggggtaaagggattgggttggaatgtccggcttaccctgaagtctcagccgccttggaagcgtattcgacctattaccaggcggtcggtatatagatattagctactgcgtttatgtgaggctattgacacactccggacgggactgacctggaagatcctgccgtcagggctgtatgtcgagaccgacagatcgtaacctgtcccgatagagctcatcttgatgttgttgcaaaggggttcgtttccgtggaaagtttatttgatttcaaggcgagagctgtcgataggtgcaaagccgacgagagtgcgactgtgtgagatgatttagcgagctcgaccgcgatcatgctcgttgcgtcgtttgacatttgcgttctaggtctttgatcgactcgtcatcctccagagaatgaggaccgagggaatgtcgagaacgcataaacttaactggttcaacgcgttttatgcgttttcacactgttaatagtgtagtgtatcccgtcgaccactcacatcacatcacttggctactcatcagctcatcagctaacacgaactcaccgtaaatgctctcgaatggatcacaaatatcagtcttagctcaaccagttcgctgctggtagaagcgataatacgatgcactcgttcttgtgacctgaagatgctgctcgatacgacgaggacgctcgaggggccgggactgggaggagcgacgatgcagatgatgatgagagatttgacttgatctaatatgattgatcctgattgatgggatgacgacgacgaaccaacaacaagcaacaagggcaacagagaaccaaacacatgtcagcttaacaagcttcccagattagatcacatgcgatacacctcattcgtacctcgaatcaagccaaaccgtatctgtcacctacgagtctatacaacgatccaaatgtctacatcgacgcactcgctcccccctttctcatcgaataccagcacccggttcagcacatacacacgcacgggctcgcttcccccaataagaatgaatgctgtcgaggatgatagcgaagccgaagagcgcgaccaactctccgacggctcgagcctttcctccgacgaggacagtacccacgaagccactatcaacgtccggcatcccaggcctagcaattatgcgcggtcttcggtagccatcagtgagctggcagcgcctggatctgctacagcgtctcttgccatgacgccggatgtagccatgccgccaggcgtaccacgagacactgcggctgtgatcacggtcgaccacctgatgcggaacatacgcacagcctatgaagaagttaggacattcagtgaggccacgtcggtaccctccctagccaagaggtatcaggtcatccttgaagaccttcggaaagacaacgaggcataccgctgcaatgctgatcggcaggatgtcggcaactttcgcgcaatcaccaagactgcaatggatgactttgcccgtcctacgcttctcttcttatcacctggagagtggtgcggtcactgcttgatgatgtatcaatcttccctgagggacccacctggcgtcagtcgagttctttggccctgcgctgtcgtggactctgcacgtcctcgttgcatcgcatgcggcctttataatctgactggtatgccacaacctggacttaccgtcaggggacgaaggatttgtcagctaagcgatgatgtctggacactcgagaagctcgagaccagccggcggaccagccggcaccaacccgtggcaccagcaaatccggcaggatttaggtcagcagcagaagacgacgccgcatttgctggactgtcaaacgcatctccggaaccgcccgatgcgcctgggctacttgatacacctggaccttcggttgcacttgtgacgccgaccaccaaaccttccggcaaggaaaccaaacctgccccttccgagctgaagccgaaagttggctctttgaagaccggcgcaggctcgagtgtgaatgaccccatcgtcttggaccatgacgaggacgtggtcaagcaggaagagcaaaatgacgggcacgaccaccgtcaggagctcctcgctatagccaaggagatatgcaatttcagtgccctaatcggggccgagacgttgcaagcccggctcgctgcgatcggtgacggtatcaggaaaggcatagccgatccgcaaatgtcaaactgcgatgtcctcaaaaccgccagtaatagcctctcgggggagatgatctataaagcagtccagcaggatctggcctcgaccatgcgaaagatgctggacatgtgcgagagggtctaggtcgagtgatttgaatgtctattgttccttgacgcgcttttcctttatgaatttgcaattctacgccccctcatgtagaagctactataccatacttgaccccgatcatatacgccttccgtgtccgatcgatccgaatgaagcccaggtatctctatccattccatcgtgaaaacacgcctcgtgatacaatccgaccgaggatcctcgtcgtccggtagctcgtcatcccaccacggctcaaaccaataggttcaacctggcactcaactctgcctgggtcctgaccaacgcgctcaagtagctcacgctcaaggtatcctgcaatcccttcttgacgccatcctcggcgcccgcaccatcctcgtcctccccggtagcagcaccagcggtcgcggcctccgacttccacctgccgacagcctcgaggaggtacctcccgacttcggggtcggcctgacgggagccagaggtgacttccttgacgtacgactggatctgggtgaggttttgggtgagagcggagatgctctgcgagagagtttggagagggggttgcgaggtctgagcggattgagagtcggcagaggcgatgttgggggtgaggaggtcgactgcgggtacggcgacaacgggggcacgatcagcttgccggcttctctggtaaagaaaagtcatgcgcgcgcgggactcacgtccggccttttcggtcaactggtacttgacgctgcaggggatgggcaggaagacggcgttctcaggcttgggtgcagatccgacctccctggcgacgtaagccttgacagccaagctcgagtcgacgttctcttgcgagaggttggtgtcaaacgtcaggtggacggccggggtcgaaggaccggtctcgccgtcgaaaaagttctggatgagggccgagtaaggagtgatgtctggcgaggaggagtacctggagtggtttcaaagtgtggatgttcagcagaaaaacgacacatacacctccggagggggcagccgacgggacttgccatccgaccaagacctctcgtccgctaccgagcttgttcatcaagtccatcatgctcttgtggtaatccatatccacggcgacctccttgtcggtctcgacatggggaagagcgaaacagtttctaatctcaatctcgctgctcgatccggtcgatccggtctcggacgatcggacaccgagcagggtcccaatcactcgaggttgttcggcaggtttacgcgattggtggtcgaggatctgagccaagaccgaggggtggacggtgacgagagaaggagttcgtctattaagagcaaaaatgatgcccacatatcatgtcagtcagaggttctttgttgcgacgtttttgcaccattgtcctagatgggcaggaggtgcttgaaaaagtcgggacgtaccccgaagtggatgggaggttgaggtggagcgccgatgagggagcgttgagagccatgatttctatattggctttccttttgggtgactgtgagattgatctaattgtatggctagtgtcgatgattttgacctgaagtaatgccactgaacaagaaccatcatatcaccaagttgagttgcgaggtggggaaagcgacgagttgaaggttgtcacgtgaaaagaacaagcaaagagaaggagagaaagcgcgctcagactcacactcacacacacacacacacacaccatcgaggagagaaaagggcgatgatattgtcacctctgtcatagctattggccattgatacagcctcgaccatcactgccctcacaaccacttcaccgtctctttcaaccaaccttcacaatgttcagcgacgagactaaggacaagatcaacgccgccgtcggtgtcggcaaggtcagtcccccccccagccttgtcgtgccgaagtcaccgcaccgtcgtcgcctctctctctctctcaatatctcgatagctgatgatatgtttccctgtcatagaccgtcgccgtctacggatggattcccttcatcctttacgtcggatattcgcggtcgtcccctcagccctctctcatcaagtaagtcgacgggccgttccatctccgtatttgattacgacatggtcggctaaccaacctcccgcactatcttcctttttcaggttgatcagccctttggcctgatctgagcgagatgaagaggaaatgcgtgagaacgatcgtgtggccagaaacgaatgtatcagtatcgtacgtccatcccagaccttgacctgctcccgaccgtctcgaggctgaacccttcaacccgtttgataccacattgacatagcaaccaattcccgcccgacgctcttgatctaccgggcaggtgaaccgactctcctcacgaccgtgatctatgtaccgatatcatatgcaatatgcctcgaaataccagaacacggagcgcatctatcggggtcccgacctgaaggggatcacccccctctgactttcagacggagatgtactcggacctggcttgatggggcgatcatgtgtacttgaattctgtcgaagtcttgtgtcaatggcagacggggattcgagtaggcaatggggcgagcatggaagtacgccaaggtctggcgcgcctgttgttccgagcgtccgcaccgtaaaatgaggggaacataagtagagcccagacgccgagacgagctagcctgtgctacctctctacgacccaagagtttagtactgggacaccttgacgtaactcgctggggccaatctttccctgacgatcttgatcaggtaaagaggtcccgcgctgaacaagacgatgaccgcgactttccagatgaagcgggtgctaagcacaaacgacaggtctggtgtcggtgtgatgtcgttgtctaattagcggtcgggacggtccgatgcgacttgtcggatctgatggactgaccaaagtattgaggcaagacgaccatggagatggcgtaaatgacaaaggtcgcaatctccgaaatgatcatccacggatgcctagcgtcagacgattcagcttcaagcgttgatatccgctttctcaagggaccacccaatactgaccaggtggtgatctcgagcgccaccatgatcagctcgttcaggatcaacgaggtgaacgagatggcgacaatgttgatgaattcggattcgaataggtatagcgatagaagcatgatgacacttcctgtgaagcataaggaagcatgggacgatgaggaacactggtcggcttgtactagtttccccaccgcgactcgccttggtatatgctgatcatgagccagatgaaaaaagtctttgtggacaacgttcggccctgttgcagcgatactctttagtctcggaaaaaaatgatcaagcggcgcggagaggcgacctagcttacctttgtaagctccttgtagagctcggggtataagagagccagatcctcattgacgtcgcggtcgaggacgagcgagaagaccggggccatggtatagagagtcgcatacccgacttgcagccagccttggtacagagcgatggctgagcgagatatccgatgcgtcaaccgacaaggacaagtgacggctaattgagacgtcggactcacgagcgaaaaagaaaatcgaagagaaaacggcttggatggttgagatgatcagtccacgatgtatcacgaattgggcaagcttggccgagcgtttgtacgagttccggccgtgccataaaaggagtttcgtgaggtggctgaattgattgatcgagaaatctgcggcgagagaggcctgtttgccttcctttcccacaataccaacgcctagagaggtacagaacgatcaacatgatgttgaactcgttgtcgaactcgttgtctcaatatctccgaactcaccgacatctgccgcctgaatcatgctaacgtcattgccgccgtcgccaatgcagcagacccgtttcctggtgtattggcggatcaaccgagcgatgtccgctttctgggtcggcgagcatcggcacgccaccacaaccggaagctgagtcgctatgctgataaaggtcgtttgatgcttgtccaagcagagctgtgcaacacagatgatcagcgacaggcgttgagagcggcataggcagggctgtacctgcagcgattcgccatcaatgactagacagcagtccagtttggtccgcacgaaatctagcatatcactagcttgttgcgcagtttgtactgtgatatgcgtcagaacacgagtcagctcggtgggattcgatcgaggcgctcgagtacatacatttagcgacctggtgaatgtactgcccgcgggaaaccagcttgctcgacatggcaatgcatgtagcggtctcaatcttgtcgccagtcaacatccagattttcagtccagcattccgtaaaatctctagtgttggcttgacgtcttcttgcagcttgtcttcaacgccagtgagagccagcaggtcaagatcccgctcgagatgctccgcaatgacgctagtgatcgaagcgtttcgatcctgtagattgagctgcgcctctttatgacgagcgtcgaaggttcgatatgcctcgtctgacaggcgcttgcggccgatgacgagcgttcgcagaccctcgcgagccatgttgccgcactcttcctctagccagtcattcttctgtacgattttggccatgacgacgtctgcgcctttctggacaaagacgatctcgccagaactgagatccttgatgatgatgcccatccgtttcgactcggacgtaaaggggaagacgctcaataccccaaagttgtgatgcacacccgccgggtctcggacggtcatgcgagcacgttcccggttgacaagtgtgactccgaccgattccgtaaagcggacgatggctacttcgtctggtgacgacgcctgatacgtgactgaaccatcgtcattcgtgacaggagtgacctgtcattccgcatgacttaggtcaataacgagctagggcttcacttcgtgtgtacttacattgtggcatgtcgcaagagccatgacagcgtccctcaatcgagcggagatatccctcctgcctttcgatgccatcacgccgccagaaacggaactttgtcgacggatgtgatctgcgaatggttccggataagggacaacggcccatcagattattaatgagagatgctcaccaggagcttgctcgcctccaaaagccgtggtcaactggtgcgcgacttcgtccatcgagtcccacccgtaactcatcgttcccatatgcagctttttcatttccatctctggcagacagcgattaggggcagatctcgttgcggcgccgggacagccttaccgttttgcgtcaacgtgccggtcttgtcactcagaaggtattcaatccggcccaattcttcagggagagtgctggttcgtacaatcgccccggcgatctctgggtcattctgaatctgatgagcgtagacagttttgcccatgtccaggttgaccctcaaactgcaccaccgcacgatgagctttcaggaaagtgatacggtctcaaacaacctcttacctaatcggtatgattgtcgagaacaagatgaggaatcgaaagacgtaaatgtaccactggcttctgaatccgttcagagctacgagcagcagagacaacaggaatgtaactgcgcaaagagtctaagcggcgaagatacgagcatcgacaaatgtcagcttcaggtagctgtcgcagaatgtaagagacccaccttggccatcttattaatctcgatgtctagaagtccaaccttactttccggctcgctggtattcatgctggctcgagtctccctgcccgtatacaccaccatgcccaccgctgaaccggcagccaagacggtattggcccaaagaacattgtccgcggataacggcacgacggatttctggcccaaatccgtggctgaggttccgatcgtgatattgccaatgaacgtatggatgtccttgatcggtggatcagctggaagatgtccacgcttcagcccaactgcggtgttcaagatcgtatcattaagggattagtgacctaccatataaactccccttcattccgaccagctgactatcgctcatggtctgagtgacaccgacggcgatacgcaacttccagtccgtctctccatccagctggtctgtccgaacgaaacaagcacctccatcgtccgcttcgacgctttccgtctctgcggcaggactatctgattgagtcaccgcacttccgtcagcgagactcagtaaatcggcctcatctttccctttttcggtagccgtggcgggtccttccgaagtacgcagcaagaccatatccgctggaatccgattgttcttctcgagaacgaccatgtcgccgacttttaatttagacgaagatacgcttcgggtcaagaggccatcttctccgtctccgctgacggatcgatcgaggatgagatacctggtcgaattggattccttgtcgcgtagataacgttgataatcgtccagggcctccttgcccatggtgacgaacaagacgaaagcaagaggagcgatgtaggtggcgatataaccttgaagatcaagtacggaccgcgtcagcatgtagaactgcctacctatcaagctgagcttaccgatcttcaaggccgggatgaactggctcaaggcgacgagcaagaaatagaggttgaagaaaaacttgaattgttcatagaagacgaccgggacaaagctgacgactgagtacttctggttcctcgtaatattggctggataccgggtagaggaggatactatacaacatcgggcatgaataccgggctgacgaaaacatggtccgagcccttctcaactcactgccacgaccgaatggtattgttcgggaacgttctgacggcttatcttccttcctcgttgtaagagtacggatcaagctctttcgaagagatcgtctgagatcagacgcttgttactactcctaccgtcacacatcgagtactcactggtttgcgacgatggccgctcccggtgccgtccgcccatcctccttcaaccccggcgctggacctaagcaagcgctcctgttcgacgctacctcgactcatgtatcctccatcgaactcttcgtcttctggcatctctctcctgcttcccggactggttcgtgaatcttcttctggtccatcagagtccctgctctttctgccagaactcccccagaaacccaggaccgagctccgtttcatcgacttggggctagctacgaaatcgttatcgtccggttgatcttcgtggactaacccgacagtgttgatcctggactgtatcgagcgattccgagcgagcgatctcaaaggatatgcattgctatcagtgagctcctccgaagggtcttggttgtagcgaggaaatgatcctgtgctacgacgagacatgggcgagacggatagcttggcggcgagctcttcctggtctattatgtagagaccatgccaggtagctcgtccgtagattttcagatgatcgtgtgattcgccgagccgttcgactgaggaaaagaagggtctatatatcgtgctgtagcaatcatggtcgatggtcaaacatccagctcgacctctacgctagacggctgggtcgcgagtcctgggtgacccaggttgagactacgcgaatgagagatatatagggcaaaatgataaaaacatctacatctccatcgatagtggtgctaacagtatcttcttttgtgcgttagtatcggaatcgctaaagtttgcatcggtctgcgattccggataggccggttcatcataccaaaagtactggtacgccacgtctgtcagaaatatcaagactaggtaaagtttaagacctttggatccttactcaacgagatggtgctatcagcttgatcttttccgcgtgagtactgagctcgctaggattttattcagctacaccaatattaagattgaagactagtccattatatcattctcgaaggaggtagagatcatcactaatcacactaaaccggccctgatggctcgtcgttcgtcatcgaaatgaagtcgctcacgccggaactttagcgccgcgtacgaattactttgaaccttggcttcccttttgatcgtcatcccattcatgaatcaacatctaccgcttgctctttgtgcaagctcttactttcgtgataatatagacaagacagcctgccgctacgaaggtgctcttgaagttactatctcatcgtcatgcaaatcgacggcgtcaaatcccattcagagacgcaagcaacgcctctagctgttccggcggacgagaacgagatcaaggtctatgctgctgctcagacacagcctgtaacaccagcatgtatgttctgttctctgtttacactggcggtgctgtgaaactgagatccagcattctaccaatgcagccgaacttcctgaagaggagttccagccgacggcagaggacgtccgccgtgcacaagcatcgctgacgcagcgtaacaaggcattgaacgagaggacattcagtctagcaaaggatagagaatcggaaaaggcaaaggctgagaaaaaaaaggtggaaaaatggcccaacgtaagccgaggctgagaagcttgacaggtgcacagtcgatcaacacaggctacgagctgatccgttgctatggacgctagaccacgatacgaatccgattctcagatcgcacacagatccagaaagtgtttccatcttcaagccggtgattaccgagagttcccatccttgactataccggagacctaatgacgaaccttttgcaggataggagcggtttacgactttgttcggtcgtccctgaatgacgaatccagaggcaagccgttcatgctttgtgagtgcctatttcaccgggtccgctcgacagaccatcatcggttaactgtttttgactcgggtctatgtagatgaaccgccttccaaacaatatccagaatcgacccctcctctcccggcaacatacattgctcaacaacgcaagacgccagcccaccttcgtaaaccgcctccgccggatccgagcaaacagagtctgatggagcttcaactggtgccccagagcgtcttgttggtcaggttcgaggaggatgagatgaaccgtgagctagattcggcctgacacgtcgtagatgcaagacactgatgcgagacgccttctgaatcgtttcgtaggttccgacgccaaggctcccttgctacccgagctactgcaacaagcggctccattgcctcctcctcccgatttcaaccgtacaccaacagctggatcgtcggtttcgcaagccggaggcgccgggacaggcaaagtggaaggagagaggaagattccaaagtaagatttgctcaggccttgagtcgtcctttctatactgatgagatcatctggtgatttcattgcgctgcaggtggttgcagaaaggattgttgaagaagaagtaatcccctcagacgtctgcatctcctcccgtccctcggggtcgcacattaccgaccgtttcctgcatgtagaagattggccaggccgcatctgcatcgctttgatgacaaaccatgacgaaacagaagcatgttatggttccatgactcgttgctatgcaatacacggcggggttttagactttcaacccgcaggtacacggtaggcgtgtgtttacagttacgcaaacatttccaatgacctctttcataccatctcgagccttctttgctatcaagaatttgcgccgaacgatcttaacttgctgcaccagcagtggcctgaaacgaaaaagccttcctatatgatcgaaacccaatacacacgtacacaatgaatatatctcaccatgtcttctcgggtggctgaatttaggtctgcttatcgaacgcggacgtcgtacccgctatttgaaagctgctactattcatcgagctcgagttatttcggcttgtcatgattgtcataacggaacacagcgcactttggcgaggtcggcaacgccattttgacgacgagaaacagaggtatgggtatcgggctgtgctccctgcctctgcgtgcgtttatggcatgcgcgcagaccgatatcggtacagtcgcttccatgagagtgacgccgcgtacccgaaatgtttcctaacggacgatagcttccggcgagtcacgctcgacggagcttttccctcgtcttttcccgacgggcagggcggctcgctctgttctagggattcatgtgatcgcgaaccagccagccccgagggtgttcatgggaacgagaacccgagctagagtcgtactttacacctgcatctttggtggcgcaagtctgtgctgtgtggatgaatggacggggcgcaaaagcgttcgccctatcggatcgattgaaagcggcggcaccgagcgagggccacgctagccgctacagttagcaagtgtgtgagtgtacatgcatgcgtgcgttgtgagcaaaaaggcgaagcgagggcagcaggggaacgagggcaaagtcacgcgcgagagccaagaccaaagcatcagcgagggacggccggggcggcacaggaggaggaggaggaggaggatcaaatgagatgagatcagatccaccggaaggttcacagttcacagagttgacagttccaagtcagagacagggccagaagccagaacccagaagaagatcgtccgatcagcgtatcgagcaacgacatagacagatagagagagtcatacaacaatcaatcaatcatcgcggaagagtctgtgattcagtctgcatcggtgttgctgcaaaccgttcagtcgctcagttgcttcgtggtccaggcgtccaactttgcaacgtttcttcatcactttacatcgaacggatcatgtcgacctagatcaacctgatcctagaaagccacgagacttgccgcaaacagcataatcgtcccgcatagcaaagcataccacagcgcaaatagaccgaaacaaccgccttgatcaacctacgaccagtctcgccagcgaatttatacccacttgaatacacaacgactgaaacggatcctctggcctggacttccacacatagacacatacgtataccatacgactcttggactcggccgatcatacccaataatccacacaccgctatccgacctcctctcgactcggaactcgactcgaggagcacgcgtccaccgaaaatgttccgccgatcgatggacctcctcttgctcgtgacgttggtcagcccggcttccgcctttgtcttcagctgggctcctcctagctatcaatgctacacgcagacgctcacttggcaaggaggtgtaccacccttcaaggccatcatcacgtaggtagcttgacaaacacagccagtgccagacggctagacctcactctcactctcactcgactgaccggtccgttgatggctcgaacagaccggcactgcaaaaggcattcgtgtacgatatccctgccagtgcgttcaacgtcggaaccggtgtcgggaattacgatgtgagtcgtcgtcgtctttcccatcgtgatgacggtggtcagagatgcggttgctaaacagattcgcccatacgtcaaacagatccagttgcagctgtactctgggattcagtacgtcctttggatgagcgatgcgacgggcgtaggaactggtgggagcacgaatgcaagtcggggacagaacgttccagaaaccttctagaaaagacatcactaacagccccataatatcgctttctacaggtcatgaccgttcaggggtacggcgagtctgcatgtttgaacacggcagagcggaatcagacgcaaatgacttggagcgtcgagacgttccaggacaatatcgtccagtgcaaaccctcgttccccttggactggagccagacggtacagaccggacaagctccgttcaacatgaccgtcatctcgctggaccaatctttcgatccgtacgacgtcgatttcggaagcaactcgacggcgaattgggtggtcaacctggaggccgggtcagactttaccgtcatgttcaatgatgctcgagggtacgggacaggcggtacaggagagcgataccgagtgaattcaacggcgattggagatacgagttgtctcgacggaggagggaatcagacgatcacccctgggatttcccatacgagaacgtccacctcgatgagctcgagtagctcggcggcgacatcgacagcggtgtccgggggcaataatgaaggcgggctgtcagagtgagttgatcagccgagcagagtcggtcgagcggaaaagaaggtcctttctgacgctgacaaggcaaaactcctcagtaccgccacgtatgctgttgcctcggttggagcggtcatcgggatagccttgagtgccgccattggattttgctgcttcatctaccggaggagacgccgtaatcgcagggaaaaggggcaaagtcaaggcgatggaggaggacgcgaaggggacggcagtggcaggacgggcgctctcgggctgggccgattcaggaggaatggaggccagcgatatgatcacccgaatgaaggagtcgatctgtacgatggcggatcgtccgtgcatggtagcgagttttcgcccgtggggggcggagcagcgcggatggggacaagatcggcgtcgaacaactactcgcccatgccatatacgcccggaggagaacattccccgggaatatggactggaggagattatcccttatcggcgaccggaacatttacaagtgccggccaggcaggtcggggagctggccgggatggcgaaccttggcatgagctggacgagtatccggcgtcgaacccgtttgacgaccgaacgttgagccgggaagaatcgctggctgcgttggtggacagaaaatggcctcttccgccaccaccgcactcggcgacccctacctctgctggcgcgaacggagagagggggtcgccacaggatacgacgagtcatacggatacgcctttgctcaggaattttgctgcccaagaggagggaacagcgttgtcacccgctggtcaacggaaagaggacgagatgatagccgaggttgagcgagcacgagagcaggaagcaacgactgctcccggctctacgacgggttcgacctggtccgcaaccggaaacaatcaggccgtagctgcaaacgctctattaccatctgcgggaacattcagggtcaccaacgctggcgaaggtgatcctgtgctgccagcccctgctccttccgcgaccatgcctcgaactctgacatcggcaggtacgggtcaacgacggagacatcacgttgatccgttcgatacagtacagccgagattcgttcgacatgccgacgctggtcgtgtcactcgggaggccgaggtcatcgatctgccacccctgtataccgatctagatcaccggaatgacagtcaagcgaacgaacaagattccccaggacaacgggaaagaaccttgtagtgatgggcgatcattctcggccgacttgtcaagtaaactatcgttttgtacgctgtatccaccaatctctcgaaagaatttagggacgtctaatgatgagcatatagattgaaccgtaatgaaatgcatatcgtaaatcgattgatatgtcgactgaagggtccttcgggtcctgaagctgagacttgtggttcgccgtgaatccgggatatgacgattccgttgctcgaccgaccgcgaacgactgaccaccgtctctcttgatctcttgttcctcgatcactaactgagtcgtcctagatagtgaagaagggcatgtgagaacctggaatcaagtacaacaagactttcaaatatcgattcatcgcggaagtcggctctaccgacgccagagctacaagtgaacacttccacgacttctgcatctcctccattcgacaagcaatcttcgatacgacgcgatgggccaggcaggatcccaggtcatcgacaacctggaaaagaactccaactgtgcggcatccgtatctaattccagtattccaattccctcgctgatagcttttcaatcccatctttcctaccgttgttcaacgcggtctaactctttcaccgaatctcgacaaacgtctcaaccatgaaatcgcgcttcgttcactacgctctgatttgtcaatcgcacagtttcccaggcggagctcatacgtctcaaaaagcggttcatgaagttggacaaggatggcagtggtagcatcgacagggacgagtttctccagatccctcagatcgccaacaacccgctggcacaccggatgattgcgattttcgaccaagagtaagtcgacgagacgctgttccgacggtcgaggacacgtttcgtttcgaggaaaagtagggcagcagtccgcgacactcaaaaataagggagggatagtgggatcgaccctcacaggccgaaatgccggtctatcactctgcattccctgggcagagcatcaatacgcgacctcgtcccgatggactaggccgagcatcgacgagctcttagtccagtggcaagaaacacatttggccggattcgcaaacctgaccccggtctcatattccgttcaacccgttcacaggcttctccttttttgcaagcaccgctgacgtgtcttgctattctatctcgtgcagcggctcaggaacggtggatttttccgagtttgttggtggactgagcgcattcagcagtaaagggggacgagaggaaaaattgcggtgtacgtggctcgcttcaaggggtgtaatagccgtgcggtacgaactaatcgctattgacctgtgcgaacagtcgctttcaaggtgtatgacatagaccgggacggtttcatctcgaacggagagctctatctggttctcaagcagatggtagggaacaacttgaaggtgacttatgcatcatgggctgtagagcgaggcgagtcaagttcctgacgtgctaatcgccgttcttcggaccacaggaccagcaattgcaacagatcgtggacaagaccatcatggaagcagataaagatgggtgagtcgtcatgtcttctggagtctcgtacgtcggttgttgattgaagcaaactacatggtgctagggacggcaagttgagcttcgaggagtttacctcgatggtggcgaacacggatatcatcaagtcagtagcgagcccggtgatcgctcctgacctgtgtcatctatggctgacacctcgcttcttgaatctgcagacaaatgacgctagaagatctcttctaatgacgatcatcccggatcaacggttacctttgacgaccatctctctccgccttccaatatcacgacctcactctagcgtttcgaccacttcgttcctttgcggaatcttgtagcttccatagacctctctatttgacaatgatcgaaatgaacctcctggcgaacctgcctacagacgccgatctcgtccgttgccctggccccccagaaagcaatagtcgggacgcgcagaatcgaatctgattcaattcattgcgtgagcaactgcttgagtccttccctcgtgctcttgatgtacctctccattgacatgagcgtcgcaattgctcgctgaacatcgccctcctcgaggttgacagcagccttgtccaacctcatggctatatgcttgcatgcctggatatgctcctcgcatgcgtttttgactcgctgggctttgacgacgaccgtcgtttcggtcggattcgggtccccgacagggacctccgcactcgagtcttggccttgatccttgcgaatggttttccctacagaggcgatccgggaagcggcgatagctttggactgacgggtaggcaagggagcatgaagcgctttcaaatcgtccgaggccggcccaggttcagcggagataggtgtggtgacggacgtcgagacggttgacgctgcggctgtttcgacgacgaattcgttggggagctttggaggtgggggcagtggggagctcggagtgtccactacaggagagaatgagcgagcccgtgctcctgctgctgctgctactggtggttgcggcggtggtggtactggtggatgatgctgacttcgatagtttgacgcccgtggagagtcctcgccaagtctcccagaaggtctggtgtatgactctgagaaatgcctcttctgtcccggcgaataccggtcgttttcgctccaccccaatagcccaacgtgtctgaaaggtggttcgcgagccaggtcgttgtcacagggccagttcggacgtcttgccgatctcccgtaacagtcgtccatcctctcgatctcggcttgatagtccggatctcggccagacatgtagaagtctggcctttctggcaatcgatggtttggtctcgacattaatatagagtgtggccgaactattcaggtcattgtcaggttgagccccgggtcggatcaaagatgtcgacggattcgagttttcgaacgacaagaggccgcgagcgtatcttttgctttctcacgtgcatgttggcggagtagaccaacgaaacggattggactaaattgatcgattgatgagggtttgatgtgatggcgaccagtcgtgcagagaagagacaggaggaggaggaaacgtttcatgatcacccagatgtactgatggatggcgcgtgggtgacgaatagcttacgtcattcgagcatatcacgtgacctcgacgtggttgactcgcttccggccagcaccgacgttcgagcggttcgcctctcgatcgattcaacgtcgttgtcgacagcatcgaacagctacccggtccttcatgccgtcttccatgactcgtctgggctatctttgatttgcagatccagatacgccgtacgagaactcgaccagagctcagctgcaagctatatcctattcttgtgaacaagccttccgagactcatcgaaataggaagaaggccattcccatcacatccacaacaagcgccacgcaatcgaccatggccacgacattaaaggccttccaacaagaaatctcctcaatctctgaccaaaaaaaggctgaacacttgcgagacctccgacagcaggctcaacaggcggctcagcatcatggcaaatcgtcggcctcgtccgcggccaaggcgggaggtcaagcgaaagtaaagccagcgaccaaagagaaggtcgtcaaggtggacgaggtcaaggtcggcgccggagctggagatgacaaggggaacgtagaggatgaagatgacgcagctatagatgttccggacgtttctatcgaggtgagggttacctgacactgatcggaacagttcccaccgctcacccggactctctcgtaggaccttttgcatgacaccgactcgaccgcaacgccagacccacttcaaacgaaactcggcagtctcctcgtgatacggcatggcgaactcatcgtctctctcgggcatcgaccatcagcaactaccctgtatggacccgaatccgcagccgctgggaacggtccgccccatccctccactgaacccgcttctcccgtcaaatcgacgtccaccacgagcaagaagcacgaacccgagtccagctggataggtcgaccggtggacaaggaatccctcgacaacatgctcggacgactcaggatcgtcgccgagaagcttcaagcggttctcacccaactatactttcacgccgaagacgaaccgcccgtgcctacgtcgtccgtgaactctgcttcggcggcaaagggaccttatggctcgtggatgatccgaatcaagccttccagggcggaagagatcatcgaggtcaggtgtgcggtagtagggaatgtcgattcaggcaagagcacgttgacgggtgtcttgacccgtggaggattggacgacggtcgaggcaaggtaagcccggtgttcagtgttggcaacgacgagaggaagactcatcgtgtgaccttgaacacagacacgtgtagctttgttccgacacaaacacgagctagagacaggacgaacgagttccgtggggctcgaggtgagtgtttcttagagtcattgtcgacgatcgtcgttgttaacgcgatcaccatcagatcctcggcttttctccgcaatgcgatcccgtggttccgactggtcacgccgcggccaatttggacgcttcgacgaccgggtcgactgtggccaagagggaaaagctggcctgggacgaagtgtgcagcaaggctgccaaggtggtcagctttatcgatttggctggacatgaacggtaggttcaagcgcgatcgtgtcagtgagatctcggctgacgattgactgcactcgcagctacctgaagacgacgcttttcggactgacaggatgttcgcctgattatgtgtgcttgatcatcggcggaaacgccggattgatcgggatgagcaaagtgcgccaatctcgtcgcacagtttcgcatattctcgactgacacgtctgtcttttgcaggaacatctcggagtctcgctagcgttacaggtgccaatcattgtgagttgggtctgatgccattcaacggatcttagatgctcatcaggatgactccttcacttgtagatctgtgtgacaaaggtgagctttagggaaacttgagatgatttcattcgtcgctgatcgagctatgaaccgcagatcgacatgacccccgcccatgttctcgagcagacggtcaagcagcttgtcaaggtcttgaagagtcccggatgcaggtcagtctaaccgtaaaggtcgttttgcgggtcggcttcgctgaaccatgatcaatcgaccctgtagaaagatcccagtattcgtcgagtccatggaacaagcggtcaactgcgcgacccacttgcattctgagcggtcagtaggaagtgcggttggccggtttgacgtcaaactcacgtttcgtctctgctccgcaggatatgccccatcttcatgttgtcgaacgtcaccggcgctggtctaccccagctcaaaacgatgctcaattgcttgcctactagtcagggagggagcaagtacctcaccgacgccccgctcgaatttagcgtgtcagatgtctttagtgttccattcgcgggaagtgtagcggtgcgtattggccgtgctccagcgttgccttcccaatattcctcaaattgactctttctttcccctgtccagtccggtatcatcgtgtctggcaaagtcaagagtgagtcatcgcgacaaactaccttgtaaactggatcgctcatcacttctcctcgcatagtcggagacaatgtgcttcttggtccggacagtctgggccaattcattcctaccagcatcaaatcgatacagaagaagcgggtcgatgtggagacggccgaggccggacagagcgtgtcgtaagcatagtcatgcaagtgactatatgagtcccgctgactcgtcgagaaacccgtcaggttcgcgctgaaaaaggtcagacgatctcagttgcgcaagggtatggtgatactggccaagcaggacccgctgcccaaggcaatacgtcgcttcgaggctcaaatgttggtgctctaccataacactacaatacaacctcgataccaggccatgtgtcacatcaactcggtccggcagacagtgaggatcgtatcgatagatcatccgacgggagtactccgcaccggtgatcgggcaaaggtcatcttcgaattcattcaggcgcccgagtatatcagcgcgggagccaaggtgcttgtcagagaggccaggtgccggctcctaggagtggtcaccgatgtggttcgatagaatccatgccggtatttgataactcaaagagactgtaaacacgttgtactgaaattagggcgatatgccccctaacctgtacatgcagcccgtagtcaacgcgggcatgactagcaaagtcctcgcaaatgccgccgatgaagctcatatggatacgcatatacacttcacaacctcgtgcctcccaacactaatgcccgcagctgtcccggctttctcggctgtacgatggtgttgttgtgcctcggtgtttcgcggctcgagccatagtcgggcgcagagtcctcttcgagatcaaacatgtttctgccccgctgagcactgcccgaggacgacatcgagggctgcgttcgatgtcgcgatgccgatgcgccgccaacataacgccacgcctctatgtgaggagaagcgtctgaatcagacgacgtctccagatcatgcccttgttggtctgtatgtgcgccctccgacggcgacatgaggctatcttgacgcgtgttccaatcggtggatgacatggatgtgcctcgcgactacaaacgcaggttgatcagcggtccttgtcttgctgcagtgccgtcacgtatgccttacctctgctggccgggttgtcctcatcctgccctgtctcaccggagtcaccatctcattgtccacatcgaaatcatcgttatcttcggtgaagaactggttgagctgatgtagggtgcccacgaggtctcccaatgtgtcgtccttggccaatgacccgctcgcaaatgtgcggctcgtttcggctggtctggctggaatccgcaaggtcacgtcctgtattgtctctggagctcgtgtcggtgtctgtttcccagctagctcgtccacgacatcggacgccgcttctgatagagatacaagaccatcgccctgcccgccgcatgtcacacgttgaataacgccgaaaagatcgtccacggtactgctcgaggtggcctgtcgtcgagcacagccgcgtatgatacgtagcataccagcgagcgcagcaggatgacatgcacggtgctgtgatcgaacgtcagtggtagactagactgattctgagcgcagtactcacctggggactcttgagcatgcccgctgcctgatcgagacggaactgccatgcgcgctcatgttcatcttgaggggccaagttcagacatgtgacggagagtggaaatgccacagaccagaggccaggttcgatcgcaagtctgtctgcctgactcgagattgtcgagatggcttggccaaacggctctaatgaagcgagtggcatctggaaacgacgtcagaggagcaagtgatatcgagggttcggccggtagctcacctgttccatccgcttcaggatcggaagtagctccaacgtaaacgcctcccgcacgtcggtcgatccggactgggcgaactgcatgcccaaagttccgagcgtgccggaagtacccaatacgatctaagtatcgaatgtcggtttagattttctgccattgtcgatcaaaagtggcgtcacaacataccgaatctggcaaggacagtagacccttgagtaggtgtcgaacattcgagacgtccaacagatcctgggattccagctgagctgccagccgtcccaagaaacggtcggaaatcgagtccgacctgatcaatcccagtacctcgatcatgatatctgcgagtataacatggtcgtgtggaaacgctgcttgaactctgttgcaaacgagacgatcagactcgggatcgaagcgcaagaatcgggtggaattctcacgatcctagagcggtgtaagccaaaaacaccgtgtcttccagttcgagcaccatctcttgctccatctgatcgttctgccggatgatctccacaaacgcccggtgagcgatgtactgggctgttgtctgcaacgccaagcgaagcgacgtcagcaagaatcgatcgtatttcccggccgtgtcgacccaccgtccttctctcgtcgaggatcatctcgagctccctcaacctactatcccctaggtgtcgctcctgttgctctgatttgctaccttgactctttgcccacccgatcacgaaatccatcacctgcttcgggtaatccttggccactgctcctagtgaccggaggagatcgtcatacgccgtatccctaccagggctgaccaacccgggcccggggatggtcgtcaagaggggctgagcgacgacgagttcgaccttgtccgacgaacgagaggcgaaccgccggaagagttcgtgcatgacaatctcccccgggctctgtggggtcgggatcacgaatccttccgcagcgggttgatcgagctgacgatgatgatgcatgctatgatcgctggacgagtacccgtgtgatgctcgtttcgccgcgacgctgctgctagagggtggaccgggcgtcgatgggccttgatcagggttgtccctgaccagactcaccgcggccccgctcgaattgtaacgcgacccgaccgacccagacccgaccgagctggcggtggtgatcgagccttgcgcgcggtgttgcggcggctgcggttgtctcccccggttggaggacgacgtcgagatgcccgtctttcgggaagaagaggacgtcgacggttgatactgcgtaccctgcgtgacaggcttgtccttgaccctgtacatcttgcctccgagcaccgtcttgccacttccacttccactcccattcccgttctgcgccatcgctagcactggtcctgaagccgaccccgatctctctaccgacctgagtgacattcccgtaggatgcaccgtgcccgacatgggtgccggggcgggtaaagcgttcgagctaaaactcctgtgaaacggattcctcaacgccgggtaggtgttctgatgaggttgtggttgtgtctgatggttgttcatggaaggctggatgggtgagtgattttggctcgagttgttgtgcagatgctgttgaaactgatgttgttgatgctgatgatgttgttgatgctgatgattatacgtcgacgtggtaggactcgccatcgacccactcccgctcccgatggcgaggttagaggaagatgccgtcgtctttcccgaagtggccgccttgaatgcgtttttcaggttggcaaaactaccctttttcgctggcatgctcggacgttgttgttgttgttgtggttgggggtcggaatgatggaacgccgggttagggggcgaggtgatcgacgtcgagctttcccccgctgcgggtaggttggcgaacccggcgtatcccccggctaaagaggccgatgaaggaggaggaggaggagcatattggttctgacccgagttggtgaagaagctcgtactggatgcggaacctgggacgacggagatggggctcgagtgcgcaatgtgcgagttgaggttcggttgagtgctcgatgccgagcgttgtttaaaggtcggtctcgagggcgtctgttgggccgagtagtgatccgaagttttcgtataatgcgtccccccaccttggcccgtactcgacgccggactcgatggatgggggaaagcaaaggcagaacgggcagacgaggattcggtcgagtctgcccgtggtttctttttcctcatgaacggggaagcgctgcgtttgctgtagctccccggggtacctccaggggatcccgacactgaatcgaacgagttggaggacgagtgggtcggagggaatacgggaagcgggaggtcctcgtcatcatcaaagtctggtctcgagggacaagagacgacatggcatcgcaattagatcgagttcaggtgtgagactgcgctatgccttgggattggtctgctcacttggaatatgtatttctgtcatgactgtaaggtagcgagccagcgctacgattcgagtgtttgcgaggtttgcccgggtacagtaccactacttgctcgtctgtacatgtcaatccgtgacctacttactctctagaagctagaagctgttcaaatgatcgctctcatccgaagtggaggtttcaaacggggcgtggccctagtgtgtggctcgctggctggctgctggctgttagaagcgcacgcgcgccttaaagttgaatcaagcgcagccgggtccgggcggggacttgcgttccttaccagactctactcgactgatgatatggtgatggaatgaaatggcatatacgcaaccagctctctaaataacagacggtccactcgctctagataaaccaattagatcagatcgacccactcgccgtaatcatggctggacagatgtatcaacgggatcctcgagcagtcagtcctcgtccattcaggttcgaccacatgcggacgctgctgatcaacgagacttgtcaacgattctcaacgtatcgcagggcttgtttttgggtggaagtaggatcagtggagccgagatcagggatcagaatggtgagtcttccgaggagctagggatggtaccgctcgaccgttcaaagactcgggactgatcatctcatccatgcacgccgttagtcatcgcttgtcagacggtatcaaacatcctcaagtcttcgctcggtcccgtcgggtaattacctcgctcattgccaccggatgtgcttcgtgagatggtagctaaacgtcgtcggtactgcgtacagactggacaagatgctggtggacaacatcggggacgtgacgatcaccaacgacggagctaccatcctttctcttctcgacgtgcaacaccctgctgtgagtcctccatccgggccatcccaccaggtttcacgagcaaacgactcgatctcatcaccctcgtcctcccacccttcatctcccaggcccgaatcctcgtctccctggcggctcagcaagacaaggagatcggcgacggtacgacctctgtcgtcctcatcgcctctgccctgcttcaacgcgccaacgaactcatcaggaacaagatccacccgacgaccgtcatcaccgggtaccgattggcgtgtaaagaggcgtgtaggttcatggtagagcagttgagcaccaaggtggataccctgggcaaggagagcttgatcaacgtcgccaagacgtcgatgagctcaaagatcctcgctgcgtgagtcgtcgaggcgggctctatctgatgagcatgattccgcatcagtttgcatgaattggggggcgcgagctgatcttcgttcgtcgtgtgcatagggacgacgactttttcgctccgattgccgtggacgccatgttggcggtcggtacgatcaacccgcgtggcgagaagaaataccccgtcaaggccgtcaacgtgctcaaagcccacggaaagagcgcgagggagagtttcatggtcaaggggtacgcgttgaactgcaccgtcgccagtcaggccatgaagaagcgggtcgtcggcgccaagatcgcctgtctcgatatcaacctgtccaaacagcgaatgcacctcggcgttcatatccagatcgacgacccggatcagatcgaagccatccggagacaagagtccgagattgccatccagcgggtcaagaagattttggcttcgggcgccaacgtcatcctcaccaccaaggggatcgacgacctcgtcctcaaagagtttatcgaggccggggcgatgggagtcaggcgatgcagaaaggaggatctcaagaggatcgccaaggcgacgggagcgaccctaatcagctcgcttgccaacctcgagggcgaggagacgttcgaggcctcgagcttgggtcacgccgaagaggtcgtacaggagaggatcagtgacgacgagctcatcctcgtcaaggggaccaaggtcgtcagctcgtcctcgatcgtactccggggtgccaacgactacatgttggacgagatggagagggcgttgcacgacgcgttgagcatcatcaagcggacgttggagagcgggagcgtggtcccagggggtggagccgtcgagacggcattgtcgatctacctcgaaaactttgccacgacgttgggatcccgggaacagctcgccattgccgaattcgcctcggccctcttgaccatccccaagacgctcgccatcaacgccgccaaggatagtaccgacctcgtggccaagcttcgagcgtaccacaacgccgctcagaacgcgctcgtcggggatcccaagcgtggattgatgatgtacggtctcgacctgatcaacggcgaggtcagggataaccgacaggcaggtgtcctcgagcctaccatctccaagatcaagagtctgaagagtgctctcgaggccgcgacgagtctgttgaggatcgacgatagcatcaccgtcggtaagttcagcacgggcgagtgtcgtctgtgtttcgtgtcaatgctgatccattcgaccccccagcacccgagcaaaaggaagaccctcacggacactagacgtctcccacccttttcccactacaccaaaagatgatagaaccgcctatgtttcctcctctattcgatgacgacctcctctagcacttccccacgtcttgtaacaatgacctgatgacgaggcgcttctcactacttgttgacgatcatatgagaacacacgttatgaacgcaacgaatcaaaactgacttgcatcttcaacccatgacactggtgtttctggtcgattacacggaagctatcccgcagatcatgctctgtcttgaacaagacccgagactgctcgcgctagcgacacctcgggcgtcgtcgagccgttatctcgtctgaaagatcgattcaaatcgatgcgtcgtacgttgtgatctgatcggttgatcaaatgggaagacttctcttgaacgacccgaagaatttcgtcgagagattcgatactgtgcgcactgcgcactatgcatgagtccagcttaaattctttgggaaacaatgccgcgggtcgccacatctcgggaacaagacgtcgaccatccgtcaccgcgaaacgcacggctgagagatcatacggagtggtgagaaggattgatgggatccgtctttgttcgtaggttaccaactctcggtcacgacacgtccagaacttgcgatatcatgatgggcggcttcaatactcgttcgccgaccctacacaggctacatatctggaaacgttacacacatccagctaccttgtccggtagtcgttatctcatcccagcctctgttaactgactaccgccgacaatgaataccatcgaccggaaggctagtattgccgagggcgattcctcggtcaaggctgaggaccaagccgtaatggaccaacttttgatcgaatacagtgggaagcctgtgagtacatctcagttgttacgaataccattactaaactggacgtgtgttccgtcacttgaccgcatctagaactccgagcccaacaagcgggtctgtgagatgctccaaacagtgaacactcgtctccgagtccttcgcggcgactcacgctgtgtcctttgtaagcaagccgaggagccacactgcgtcaaggaaatcgacgtgaaacccttcgaggcaaagtgtatccgatgcgtggccacgaaaaagaaatgtgccttgccatggcccagcgttcggggtcgggcgaaaccacaagacaaggatattctcgacctcaagctcgaggagaaagtggctcagcaggccgaaattgccgcccagaagcgaatccttcttgaggatgtcaaggcagctcgagaggagaaggacaaggttcaaaaggaactggatgaccttgaggccatcatcgaagagcgcaaggtcaaagctaccatagatggagccgcgcagattgatgcctttcgagcccggtccgaagcggacaaaaggtgggcagaggcaatgctttgcaactttcaaagtcaagaagctctcagggcagccaaggccgataaacctcccctcgctgaggctctggagacgaaactcaataaggttaccgatatggaggcgaaactggagcaattggggaagaaggagatgcaggcggaaaagaatgtccaattgatgcgtgaggtaaagacgaggtttgacgctgttagcgggttaactcccgattcacgtatcgacctgtgttaggttggctcttctattgtctcgtaatatgcagactttctatcgtcgagcttgtaagcttgtaatacgtagacttcttcttgctttttgcctgttgtacatcagatgtcacccgattacccggccgctcgctcatgcatataccactgcaatagattcgcacgtgagattcgagataggcggcgcgggtcgagtctacgggaactgatggcggagactgttgatcatgatatgcgaaatgaccaacatgcatcacgtcgatcgctcttcagcttgttctacaaagaccgtctacacggacgatagtacagcctgatggacctctctgcagacgctgcctttgccaacaacactcgacccggcaccccggtcgcatccgtgccgtccgccgaggcctcgacgtcggccgggtcgtccaaacttgaccgacgggattctagcagtactattcgaccggagcaaacgggcgaggacaaggggaaaggcgatggtcaggatgctgatgatacagtgaggacggaagcggagaaggcccaggccaaggcggctgggctggagcaagaggtcggacaggtcgttcagcagctctcgacctggggagggtcgttctggggcggattcaggaagcaggtcagtgttcggatgttgggctgcttgacggggcaagtgaattaacacaatactttcttggatctattgcaggccgactccgctttggatgcggtccgcaaagactttgcccggactgtcgccgaggcacaggacgagatcaagatgctgcagacccagaccgcatctttcgaggtccacaagccggatatcaatttgagtgccatcggagctgcgatcgccgagggtgtcaagacggatagcaaacctgacaagggcaagggcaaagaagtcgttggggatgaagacaaaggggactctaccccttctgcctctatcccgcagctgccttccgccaagcggacgcaagagttctttaagaacctgcaggcgaccttgaccaccgaggcgaaccaaattaatgccaacgtcacctcgaacttcagctcgctgcaaaagagcgtctctgagagcatcgcgaacaacccctcgttgaacatctctaccctctcggccacgatccagcagaacctcgaaaaggcggggaccaagatcaacttgcgtcaggccgaaaagctcgccgaagacctactcggggaagccggatcgttcttgaaagacgctgtcaaggtggtcccacccgacgagggctccgggtcgtacacctactcgtgggacggaactgacgtaggcgtctacggctcgggttacccctcggatgacagggacaagtcgacggtgttgttcgaccgagcgagcatgtcgggtaacgacatgtcccgttcccaactccgtctgaacgcgctcttgcgtcgactgcggaccgacgtcgaattgttgctccaggacccttccgtttcgagcgagactcaggcgaggcaggacgctttcgccgctttcaagaaggaagccatcgaggacgcaggcggttaccaaggaccggccgtgcagaagctcgtctgggtcgagatgggcccagatgccaacaccgccgatgtcgaggcgttgaagaagaccaaggacgagatcggtgagtgccagcccgaccttccagcatgtgcagtctggcatgctaatccgcgagcgttccctctgaacagttcctagcaaggtctcggaggaagagttctggacgaggtacttgttccacaagcacaatatcgaggacgaggagaagaagcgtcaacaattgttgcagggtgagtttcccctggcgctcgaggagcggcaccgacgagctccactgacggtctttccgatcgatagcggctcaacctaaagaggaggaagactttagctgggacgacgccgaggcagaagccgagcccgaacccgaagtcgaacccgaatcgcagaaggatacgcccaagatgccttctgctcctaccccggaagcgatcaacctcaacgacggcgataagcccacgaccaaggtcgaacctgtcatcgctagccctgtgactgccgacagtgctgtcacgagcaggcgtgagagcgaggaaagctatgatatcgtcagcgagcagagcggtgggaacggcgcccagaagagacagaagccgacagccgagagcaagcaggatgatacggacggagacgatagcgattgggaatagttatgggcttgttgggtagaagctgtacagtattgttctgagggtcatcgcgtgtacaaattcaatatccatatcagtaacagagccagtcacctcgactaacgcttgacataaaacaagagcgatgtgatactgattcgttcgattcgaagctgcctcgtatcacatccttgtccatggagcgtgtcgttttggaaccctgagagaatagtcggcctggaagataatgcatgttgtgaatcgttgatgcgatgatgatgtcccactgccactggtcacatttttacgtaatcgtgatcgtcggccaacggatatgacgaaacgcaattgaacgctcgatatgccgaggtcgcaagatcaacgagcagacgagcagatagatgacagccaaacgacgaggtgcgccgaatatacctttgatttcagaatctacctgggcttggtcggcgttacagtcactcacgcttgccgtatctgcacaccggccgttcaatcattcctcgaagatttcggctatttaaacgcaagaggtccagaaggcacggtatcgttcacacatcaaccaggatggatgctatcaaggtggccaaggtaagccgagcttacagctcgagcgatagcacatggtgatatctagtcttattcgatacttccatcctcttcaggtcgaaagcgtcgtgctggacaaggccgggaagcgatcagaaggagtcttgcacctcacgccgcatcacctcatctttaccctttcaaacggtcaggaagaatgggtgagtcccaaatcctttgatttctcagtcgcaatacctgctcaatcatatgtggggtacaacttgccagaccccttatccgcacgttacgaccctgcatcggctaccatcgactcattccggcttgtcccccgtattcatccgaacgaggacgttcgagagcatggtgttctcgttcaaacgggaaaaggacgccgaggatgtgtggtgcagcgtcaaggagctgtgtctagtctgtgagtagtcttgacgttgaccggacgacgacacctcgtgcttatatctcgttcagcctctatggatcagttatatgcgttccattatcggcttgaagccggatcgtcatccgacaacgcgaccgatccatcccgaacgacagcaccgaagaatgacgctcaaacctctggagattctaccccccgttctggtgcaagtcccggatggaacgtgtattcacctagagaagagtttgctcgaatgggcgtcggatcgaggagcaaggcgtggaggtttaccgatatcaacaaggattacgtcgtgagtcgtacaatttgtagccacttgagcattgcccgaggctgatattccaaacctggaccttagatttcaccgacgtacccagccaaaatggtcgtcccttccaagatctctgacacggtgatcgcgtatgcctgtaaataccggagcaaaggtcgaatccccgccttgtcctatctgcactgggcgaatcatgtaaggaggccatcgtttctccttatgaaaatctggctgacatgaaacaccctgcaggcttcgatcacgcggtgtagtcaaccgctcgtcgggctcaagaacaatcgatcgaaccaagatgaacgcctgatcgaggccatcttttcctctcacacatcgcccgacactgcctatgcacctcctgccagcgagtatggcggcggatatggtggagcgctcgcagcggctggatcatcgacagcggtgtcgagctcagcctcgaccgtgtacggcgcaacggctaccaatctgatcgttgacgctaggcctacagccaacgccatggccaacgtcgccactggagccgggacggagaatatggaatactacaagatggcccgcaagacctatctagggatcgaaaatatccacgtcatgcgagattcgctgaaaaaggtcgagacggcggtgcaacgggccgaccaaacagggatgatggatcggcacttgctacgacggtctaactggctcaaacacatctcggccatcctcgacggcgctctgataatcgtccgcaatgttcacatcaactcctcgcacgtcatgatccattgttcggatgggtgggacaggacgtctcagctgtccgccctggctcaggtctgcctcgacccttactttaggacgatcaaggggttccaggtcttgatcgaaaaggactggatatcgttcggtcataagttcatggatcgatgtggacacctctcgccggacaagctggatctgaactcggccatcaagcctgaagacgaagaagaggaacgcaacgaggccgccaaggctgcacaggcattctttggcgctttccaaaagcagtttacaccgtcttcacaccacgtcaaggaaacgtctccggtcttccatcaattcctcgacagcgtgaggcagatgcagaggcagttcccagaccgcttcgaatacaatagcaagtaccttgaagacctgtattaccacctgtactcgtgtcagttcggtacgttcatctcaaatacggaacgccagcgacggctcccgggcggaatcgacgacgatggcgcgagtcttctcgtcgccagcaaaccgccaatctgcgagaggaccatgtcgatttgggattacgtcaatcagtctgccaatctggaggcgcacaagaacccatcgtacgacgcttctctggacgatcctacccggacgggtgctgacggggacatgggcgtactcttgccaaatcccaaagacgtccgattctgggcagagctgttcaagaggggagacgaggagatgaacggcgcgaagcaggttttgcaggagcaggctcagggcgtagaagtgcttggtcctatcggtacgacggaacgcgaccccgttgttgaccgggctcccgcgactgttgccaaagctgctgccgtactcggaactggcggtcagacatcggccgcggcgatggtaccagaatttcaaggcaccacacgaagtgaatcccctacgcggcgagatacggctgactcgtggcacaatgtcgaggcgtcctccgtccctgcgatgacgacccgacgcaaggttgacgcgagctacggtagctctggtaatcaatcgcccaatcgagcgaaggcaggaggttcaggctcctggggctggtcaaatttcagcaacggtgcactgacagtgctacaaggcgctgcaaaggaattgtctggagcggccaaggatatccggacgatcggaaccgatgcttatacgaacttttccgccgagcgtcctccacgagctaccacattcgatgcttgggatcgcccatcgtcgcatggtacggttcgcgggcaaggcggagtaccggtcagcaacctccataccaacggaggatggtccaacggaatcgaaacgcgttccagcagaccctcggaaagtaacccatgggccgctcctgacacacccgtatctgccgggaaccccgggtcgatgcggccgaatgcaatgcctactgccgacaccatcagctacatgcgttcaccgtctgaaacctggggttccgttgcggatcgaccgaaccgacaaaccacgacgacgggaatcgaattgaaacttggcgggctgtcgatagagacagacactcgcaaagtcgaagaaccggcgagcaccgaaattaaggctcctcccgtatcgtcttcttgggatccgcttggagcgatgtagatgatcttgtcattctttgtatttttcaaatcttccagttgtatcgccgtagacgatgggctcattctcttatcaatgtaagacagctatacgctatgagacggccttgcaatgaccaaaccctgcaaaggcatcatgtcatcaaagtcaaggacgtcaaagacgcatacagggccgcagtgaacgacaagttgacgccaaacacaaaatgaccggcgggtcgtgctatacaacaagacgaccatgcacaatgacccttttccaatacacgagatcgcgaggcggtgcaaggaaatcacacacgccgacctactcggaatcactcttccccagcgaacctcgaattcggccgcctcgtcgtcttcaatcggttcctcgatgacgtcaaaatcgctaccgcagaaccctaccgttactcggttgtctcctccgaccgcctctgcatcgagcacgacattgatgagttcctctaccgagatcaaggcattagcatcagcgtcacaaggatccaccgcgttcccgtcgaccacggcaccggcttcatcgtccccacaatgtcgcactctcgctctgccaaagacctacccgtttcacacataaactgaatcacggaacactcttgttcggtacgggcgttgcttgctcgctttctccatacacacgttagactctatagtgctactgtatgagaatggtattcatcttgccagttttcaactttatacaatgccgcgatgatgatgtctctatccgctgtgttcgacaatggtggtcacgactttgccgccttggatgaccgacttcatctgctcggggataggcttctcctcgtaatcgccttcctcggcaccgggcaagctgatattgatcgcactggtcttactggtaataatctcgaccgtgtcgacacactctttagacaggtaaacttgacccgaatcggtgttgtcgatctggatagtcgggacctgtcctagaatctggacagtgaacgaaggagacgaagtgatgctcaatcccgagacgaccgaaccgagcaagattgagaccttggagcagttgactggcgaagagagatcgctttagcatatgcatttaagctgatgggctgaagtccagtgaaacttaccggcactgatagcgttgaccttgcccttgatctcgatcacactgttcttacatccaaacaagtggacggtatggttgatctcggtgtcctcgatcaagacgtgtttcgcgttatcgtgatattcctagcatgtcggatcaggcatgttaagcaattaagagtcgctctgcggaatcgattgatcagtctactcacgacgatccacttggttccatcgagtctggtctcggcaggccgcttctgagtcagagtggacggcttgggcttagtaggaggagcaggagcagctagcgaaggtcgtgcctacaatcaatcaacctgagatatcgatagaatgagtggctgcacttacccttctccgagacgacgcttccagccctcaattccgggttcttgtgcgtctgctggctagggtcgaccttcttcagcttactagtcactcctgatccctggttgatctgagacaagaaggcactgggtccccctgaaggcgcagaggctggggcgccttccttgctagagtcgaaaggaggaggaggaggtccagggggaggaggaggtgcactggcctcgctgtcggcatcggccgtgttgctactctggaaggacgaagcatcctggccctatacgcacataatcagcgcggatacttgacgccgttgtgtcaacgactctaactaaccttggggttccaagtcaggccggtggtgtgatactgcttgacatacttctgcaatgaatcgatcagggcgacaaacgagttggcccagacgacatgcttcttatcgctgtatgtagtatcggcttttgaatcagcatgacgtgctaactagatctgcggggctataggacaacgtacgtctccttgaactccttgatgacccggttagcccagaactgagcagagtccttcatctcaccaacaaagggcgcaggagtgggttcctagcaagcggaaagacgcgcacgcgcacgtcagaacatcagatcgtcgccgactcctgccgcataatgcttcaagacgactcacaacggcaacccaaccccaggcgctggctccttcgccaacggtactaaggtggttcgcccactgcctgccctccttgcccctcgaagccttgtctttaaagtcggtgacctctttcaaagcgtcctggatgggtgagaggagcttgatagtgacttcctgcgaggtaggcttagcgcaggacgaagccgtctcgatgtgggacagctgagcagaacaaagcgcagcgatcaagccagcctgtagcgagatagcgtggcattaggatggcgaaacgaattagatctcgaaccaatacacgtacgtgctcagccacgggtccgccgatctccttgctcttgctggtatagtcttgcaacgctccatcgatgatatccgactgataagccttgtaagcgggcgactttgcggtctctgccggagccgcagccgatgcagcatttgcagagctctggccagtcgttccagcaacagccgaagaaggagcgctgtgagaaggcattggcgagctggagctgtgatgggctacatcttcaagacgagccgtagcagctacgaaagagagcgagataccgtgttcagcaaatcggcatgatcctccatcagcggaacgtgattcaccttccagccgtttactgtattgacacaacggtcacggggcaggccgtcagtttttcgccaaggggaacatacgcacagctctgagtgctcacatgatcgtagcaagattgttcaatccttgttgactcgtcatcttgttgctgtcggtcacgggacgacatatcggacggtcagcctgggcgttttcctctttcgatgcgatagtccgcttaccagacttttcaagaattctactgagaccgtgctgaatttcttgactgattgcctcgaagtctgagtgctcaggttgttagtcatcataccatttcatgtcaacaacacctcccttgatcctatatacggaggatgatggatgctgatgatgtggccaacgtcggtctaggaaccaaatcggaaccaaatcgaatgtcggttcagggttccccgtttcccacgaaaggcgcacgcatcgacacacaggtcgcacagactaactagtatgcaatgttgtgacaacaatagtgcagtgtggtacggtacggcaagcttcctttgcaggaatcagatcgaatgagagttttatgggggtcgaacgtcatgacggatgccgcgtcacacgtaaacgcccatgcctgactactacttccgaacctttccaatatattccttgtagtcttttgacgtgtgatcctggaacgcttcccctgctgccccctcgtcgaccccatagtcatcctccagaaccttcctcctcttctggtattccttgtttgtctctcccatcgatttgagccccttcatcaactttcggttggtcaattcccgttgaatccgagcgccccagagttcggtaatggcgaaccctaagaaactgatcccgaagagtccgagtactattcctgtgagacggaaggggcatgatgatgatgagggatagtacaagcaaaaggattgggattcgagcgaaccgatggtgaaccatttaaattccgcaaacttgtcatccgcgcctgctcctcttcttgccagagtccttaacgggtccgatattcctgtagacatgttcaggcaaaggtttgcatattgtggacgtgagatggttggtacggtcgtaaatatcggtacatcctgcgtcatcatagcgccctcagctgccgtcttggttaagagttctgccgcggagatatgtggttagccgtggtcgagacttgccaaacccccttgttccgatccctttgtccgccgggcgagcgaaagggcgtcgatcgcacgccaatctcaatctggtcgcgggagccggcgcataatcgaatgcgtgcaaggatatcatatgcttgaatcgccgggaatatcgcgttcagcgactttgtcggatattgacttttacaaattggaatcttgagattatcttgggccccaaaaattcccgagcgatctcatatgtctctcgaaggaaaaatcagcttcagcttgagaaatgggaatgacaaccttcgagactcaccttctgcattgtcccctgctcatccgctctttgaccttttactaaagtgcttcatggcacaatccaggttttcgtgtgctttgatctcctcatcgagctctttctcctgccgaatcagatcggtttgatttgcgactgtgagggcgtaatttgcccgcaaggcttccaccctctcttcagtctgtctcaattccctctcggctacattgagcagcctcttggccctggagatcgcggcgccgcgttccgacaagttcagagcatgacgcttgttccgaagggcggacaatttgcactcgacactggtaatgatgtcgtccgcgctcgtagtcaccagctcgagtggatcatcctgacgtccacgtttcctggtcttcgtactgccgctcgccacggcattcagtagagcggggactgccgccggttgaggtcccacatgaatcatttcggaaggcccgtctgttgctctggttcgtgtagggacctgcaccagcacgtaaagagacgaggtcagtcagcttttgtagacctctcttccatacgcatcgcgacttgtcccacggagcaactttagtgcgtgagggttacttggccgtctgagttcccgagcgccaggaagaagagaccttggagcaattgtgagctcagctgcgatgcaggcaagcgtagagcctgttgcagcttcaagagtcggaggctgctgcggcgaacgccttgtggaccgtgtagactgagtccatccgtatcgacaatcgtcgcctgaggcgacacattctaggcattcagcgtgaccaattggccgaggctgctgatacacgtccgaccacggtccatgcatttcgagcactgtgagccgatttgtaggagcgtgagaaaggggtcatctttggccagctttgtcagacgagaagtcgcactaatctgtatgagaaatagcgtcttgatatcaactatctacggacgagtcgcaaggtgtatcgacaacggacgtgacagttatgttgaattcagacacaaatctcgcgaaggtctgcatcggtcctcttgtgatctacgctgccttccatggcgggttttaatcaacgatagtttgattgtttgatcacgaaatctttgacagcaagccaatatgccagaggaattgacccctgaatggatgcttttagcttgtgacgacgcatgtttgggttcagataggatgccgatatctatgcatctagcatctagctaaacccatacggacgttgtcgtgcccatccctcctcggaaccttttcttcttcccgggcagcgccccttcggaagcaaatgatcctccagagcgagaaagtccgaacccgctcatctgagatctctgctaccagatcgacctcgatcggtctacaaatcgttgcctctagcgagattcaagcgactacgaagtacgcaatcatcctcggaatacatactacaagatgggcggtgcaaactgtacgttcaaagccagacatggcggccaggctaggctcggtcgactgacacctcgtctcttctcctcagtggaagtgtggaaattcgggttctacaccctctttcccctcgcaacgctatactactttagcgatgatgattggtataacaagcatgtcgttccggtgagttatacgcctcgaatctcgacgaccttagtcggagtgctgagacagattggaaatgatcatttgatacagtacgggaagaagatctggccggagtatgaaaagacaaacgtgaggggacatcgctgcgttcatagtgaatcggaggactgagctgattcaaacgctgcgtcttcactcgtattctctatctgcgtcaaatctgtccgatcggaaaaacacagcgaccaccgcacacgcaacaagagatccaagccgaactcacccgtctcaaaaatctacgtcaagccggtatagacccctcggcagggtccacatcgggagggaccatgtcacacgagatgcgtgcggcggcttcgacagggatgtttgcgagctcggagacggaacgagaggcagaggtcccggctcgagcgcctgagcggatagcccgggagatgcaggggaacgttgcggcgagtgcggagcaaggttggcgtcaggctgatgccaagaggctcgtataaaatgttgatggatatgtaggaggcggaagtgtgggagaagccccggtcatgctgagttgccccgagaaacgtgtcggaatgaccgcgggaagcgacacgaattgtataaactcactgctcgacgaacaatcatgcgcaaaggcacgctcatggcaatgtaaccgaattggccgagtgcataaaagaccggactgatctgaaagacgcggcggtgcagatgcggtcatactggcagcaatcgaggagcctagcaggccagtccttgcgcttgcataccaactaggaattgctaaacccgcaaagcagggtatgcagggtatgaaaccattggatacgttgctatccttgcatattacacgactacctacacttgatcattcctcctttgtctctcgcataccacctgtctcgcggccgtcatacgactcccggcacttatcggatcttcttggccttctccttcatcctcctcgccttgtcctgcttgacgccctgtgcgatctctgcctgaagcttggggttgtctacaacgccaagaagaatgagtggtcgaggtcagccggccgagcggggtggtgatgtgcctgtatgcatgcttacagttgaaagcgaggaagaggaattccaagtgcgaaaagaagggagccaacacgacggctatccgaaacgaaaccgattcccaatatcagtataaccctgattgacgcttatgccgtgtcgattcgaatcgaagaccgtccgcctacgcaccttgtagcaagttgtccaacaaggccggtgccctcccctcggccgcaccatgcccgatgaactgactcaaccaactgaacagctgtacgattcccgcgagcttcatactgctcatccctttgaggggtcccggaagggattgggtagaagaggggaacgaggcgaggtgcgtaacggtcagctgggagaggacggcttgagggaggtaagtcagctgtggaacagcgacgaggatggtcagcttgtcatgatcggacgggtgtccgttagggaggataccgatctgcactcaccgctccgaaaggctccaatgcaaagtagtagagcacataggcggcgttataccacaaggccgcgttgttctggaagctgaggaatggagccagattcttgggcgcggacgaggtgagcgggacgtgggcgaggatcaggaggaacgacctgataaggcagcattagggattcattggatttagaaggtaaaagatgcaaacaacagtcagctatagagtcttgacaagtaccgttacgaaaaaaacgaccgtgctcaccacaagatcaacggaatgcagaccatgtgaatggcgatgttgatcgggttcgtgtggtacgaggcgtagaaagtgagctggatcaacagacgatcgagcgatcttcagctaaggcggcctcgtggtaagctggtgcacagacgggactgacctgtttcttaacgttgagccagtcagggtagggcgatgtccccttacgctccatctcctcgtccagcgactcgttgatgaggtccttggagctcagcttttccgacatgatataagggttttatgctgcagtcgataggatcaagatgtggtattcgtcaagtgtaatgcacaagcgtatagacttgttcaaacagtcgatagaggtctgagtatcttgaacctggtcgcccattgacaactttcggttaatcgattgatgacgacaccgataaccgggaaacaaaagggtaacgtgccaggtcaaagcgcagggtttagcttccgaagcgcatttacggcaccggaaacagattccttccgggagctaattttgatcttgtcttgtctgatcagaccgaaatgtcaacctcgactgacacaatcgactcaatggcaataacggtaaggactgatagcaatagaccaccacagtcaccatgcccaaagcagtatctcaacgactctcgcgcaacgtgatcagcgctccgaccagtgccaacaaccggccgacgaacaagaacaagtcgggaggcggcgatggcaatgctgaagcttcagggagcggaggtggaaagaaccacttgttcgacacggccaagtttggacaacacatcttgacgaatccgctggtcgcacaggggtgagtcggaacgtcggtcgcctcagcaagtatacgaggagctgactcggagtcgtttgccatgtatcagtatcgtggacaaggtaagctcgtcgacgaaccttactcttcatcgccccttgtccgctgaacctgtcatctttgaacacgtcctaggctagcttgaaacccactgatatcgtcctcgaagtcggtcccggaacaggaaacttgacggtccgaattctagaagcatgccgaaaagtagtcgccgtggagatggatcctcgaatggccgccgaggtgcagaagcgagtgttgggcaagtgagtctcgggcctggctttggcggcgtattggtgtgacctaggcgatctcgactgacctgacactccttggtcggctaggcctgagcagaggaagctcgagttgatcattggggatttcgtcaaggccgaactgccctactttgacgtttgcatcagtaacaccccgtaccaagtgagacatacccatatcatacctcgaaacgctccccgtacaataactgagctcgattgtcctcccgtgcttcagatctcgtcacccctggtgttcaagctcctctcccatcgaccgatcatccgaaccgccgtgctcatgtttcaacgagaattcgcactccgactctgcgcgaccccggccaccccgctctggtgtcgactgagtgccaacgttcagctctttgccacagtcgagcacgtcatgaaggtcggcaagggcaacttccgtccgcccccgctcgtcgaaagctcggtcgtgcgaatgtcccctcgggatcctcctcccaaggtcaggtttgaagagtttgacgggttgaaccgggtcatctttagtcgacggaacaagacggtccgggcgtgtttccaagccaagggggtcaaggagttgttggagggaaactataagacgtggtgtgccgagacgggcaaggtgagtcgagcgtgggctgacatcggggtgtgtctggcgaggtgcgagtagctgattttcacccaatacgttatttagatcatcgaggacgacctcgacttcaaggccaagatcgagaccatcttgcaggaatcgggttacgcggaagaacgagctgccaagatggacgtggatgatctgttaaagtgagcgtcgacgtgcttggctgcgaaaagtctctcgtcggtgaagagcttcttgttgatcgacgttgcgcaactctcttcttgtttcgacagactactggctgcgttcaacgtacagggaatgtgagtctgctcggggttctcgaatcgacgatagaggactgcccttgctgaccgcgtgaaatctcgacagtcacttcgcatgatcccttgacccttcttcagcttcgtatctcccgtcgtacgattattctctcgtctctttgctctttcctttagataccttatgttgtcagttttgtactgtacgcatctatttgacagagaattcgattctttgcttccgggaaacctccggtgacgaacgacgaacgacgaaccccgtacgcgtacacgctttggagatcgacggagaaccttgacttgacttgacttgtatagcttgtatatcgtactgacggagagccatcttcaaagcgagcaaagctggatgacgaggctctgcagggcttcttgaaagctgcaggaccggtagttgaaactctggagaggaagttcaagggtttcaatcctgactacagggactccttgctgacggcggcagatcaactgcggctgaaagaggtctcgaagggggaagagcgacggtcgctggacctgatctttgggaactttgaagcacagttcagtatcttgaccggtgtggagagcatatgtggaaaagatgtggaaaaggtcaagaggcttgtcaaccgcttcttccccccagtcgaagaggaagaagactgatcgtcagggagaagactgatcgagatgatgtgcaagaacggaacgtcaaattgtatattcaggatttttgctacatacttcgtcgtctggctttcgtgactttgagaaggcttcatactttagacgacagagacggagacgtcgacgttcccagcgacagccttggagtaggggcagaccttttcggccttgctgacaatctcctgcatggtggacttgtcgatcccctccggggtcttgaccttgagttcgacctcgaggaagatgtcgagcttcttcatgtctccgcaaagggccacggtggactcgacgacgaggtcctcggggagggtgatgttctgttgcatggcgacggcgttgcaggccgaggcgaagcaagctgacgaacgcgagtggaatggatcagcgaaaggaggtctcggtatagcagcgtaggctcatgatgtttggatgggcaggggcaagatagacgtaccggcaaatccaccagcgaacatctcctccgggttggtctttccatcgctaggctttccgaggatcttggaggtcgacagcttgaggtcgaggttctctgcgaacgaacacgatcggatcacagcatcagtacgcgacacatgcagatggaaatggcctgaggaggtggaggaggaagaggagttgactcacctccgacgacggatccctgacgagcaccagtgacggtcgtgccagcggtaaagataggcttgctcttgagtcctcggacggccatcatctgggtcggtcggaccgatcgaacggcggtgcgggaagaggcgacgaggtttcgggcgaacattgtgatgatgaggaggactgtttatggagttgctaggtttgtttcgagttgagaagagagagagagataggctgtttaaacgcgataaaaaggtcgatatttgcacgtcgatcctctcgacgttgcgtcgatcgatcgctcgttaacctgggtcacccacctttcgtcgtcactcgggagcgaaaagaacgcgcttttagaggtaagaatgggaggaagattcctgtttgtataccacggtcgcgattgagcaagtatcctgatcttgccgaactgctaaagtcttggatgcttacggtaagaattgcggttgtgtcgatgtacggcgacacgaaatcgtcgatgtctggcaggtaaagagccaatctttaaagcgttgcgagcgtatcgtcatcggtcgatggtagctagctcgctggctggctggcctcgtcagcgaatggacggggtttgcttccgaaatttgcttccttcgtcgtcaagtaacctccacctttgttcgtatcatgcttcccaaataatcatcttccttcagtaccgcaactttctcattttctccaatgatggtggcattcccaacctcgatcggcttcagcaccgcttttcgagtatgaaacctatcactgtgttatattttgcgtccatccgcactcatcttggagtcgaacaagaaacgttcgccgcaccgctcacgctcaactcgctcaaagctcaaatcgtcacacgtcatccggatgacaagacaaagtcaatcctcgagggatgcatgtggagcgtaggggatgagatggtcgatgaggatgagagcggagaggaagaaatcaagggtggggtcgtcgtcgctgtgatcccgccggtcagtggtggttgaggagcgaaaggcctcaaatgaatgggtgggtcatcgtgctatgtgtcgaagcttggcgtttcgctaacgcacgtcgctctcagcctacacagccgtgatagctcttccataccgatatggcagtcgcagcctatttcaatctagacctctgcggacgactcacacgagcgatcggtgtgatatcacaagcggccagagcccgaacggagacggacgtacgattcccggcggcttccaggaggagagacggcccaaagcatcactatccggcaaacaggggatccttcctccgttcttgatgtacagtctagatgatcatagatgcgaggttccaaaccagacgacccgactcgcctggacgactctccattgctcaatatgcgggagcttgaagcgggaagcgactaaccgctaaggcacagtgctgattgaaggtcttgtgtagacccggcggtcgtttcttgcttcggcgagccgaggcgaagttcttcctattgaatgttataattattcacaatgacccagacagtgtccgctcgacttcaagtgtatattcgaagaactgtggttgaacccgcacgaccgacgatgtcagctgcgccgttcgaatcgaccattctgaaagccaacaatgtagactggatcggcttagcggcattggtgaacagacgaatggataatgagtggttacttgatacactggtgttttggctatatacctatagagcaggagagactgcgtctgcgtaaatcccgaatcgatctcttgttccctcgatccaataacatccttccacgcttaacatccaaaccagctgcgtgcctatgtcgattgttgaccgggagcttgagcgtcgggtgccggtttaccggtcatccagctcatgagggtacccttctggtccgcgagctgcttctgcctgtcttcctccatgagactgccggtaaggggtgtaaacagtgaagcgatttgcacagaggcaggaaggggagaggtatcacgagctggattcagtgttcgtccttgcgattggtatcaaggctgcgcctgctcaccgcttgatctcgtcggcgttcttacgccaatactcttgttcatcccggtacatggcttgagcctgggctcgtttctgttcaagataagtcaaaggttgagtaggcctctgcacggattgctggaaacgagaggggagaggcaagtccggggtgtcagcgaacgttcaatgaatatggccatgacctcgggcttacccccccgagtccactgaatgctcgaccgagccacccagcccctacaccccccgtcgcaccaccgtggtcccgctcccattcctcgatcgcggcctgcttcctttctgcctcccgcttggcatattcgaccggaatgtttttaccctcataggctttgaggattggtcgaacgtcgggaggagcaaagatgccgatcgctgcgagatcgacacaagtacgcatcgtcgtcagctgcccgtttgtgcgacaacagaaggtggctggtgatcgactcacattcgaggaatgggatcatgtcaatcaaccccttgtcacccggagtgccgttccatttgggaatgatgatggcattctcgggctgaagcgacgcgtgatccgggttggtgtcgagcaagacgacctttgaaagatctcggttgaggtaagaaagatcctgaatgaaagcgtatgcagcccttcgatcagctactgtatcgattgattcccggtgcttgctttcgatggcttaccttgacgaccttgcccttgatatatctagtactctccctgaatagtttataaggcaagtaggcctggaaggggtcgagcttgtccgccacgggcagagcggtctgcgatgatggatcgtgcgatatttggatcagtcagcccattgacttcgtcgagaatcccttgctgtgctcacgtataaaggttgcgaggtgaacaggacaacttcgtagaactgcgagagataggccaagaagtagtcgactccgggtcgcttggcggtcctccatcctccttgtcgctagaatattcgggagcgcagggatgatccgggtcagcagactatacaggccaatcaagtgccacattcgttactcacgtcccacgcgctgtgcacgagcatgtcttcgagatcgatcaacagagtataaggccgttggtgaggggcggggagagggtcgggaaggagcttttcgaatgcgggcttgttgaaagtctgaggagacgaggccagagcaggcatggtcagcaacatcactctggaagccaacatatcactactaaagactcacgtcgagcaacccggtaaagttattcttgaacttctcccaagctcccaaaccatcttctccaatcttggcctcgtcatccttggtggccaggtagtaggccccgacacccgagccgagcaatccactgagaagcatgaatcgagtgaagttgcgtctcctttgctcgatagaggacaagctgggcttcgcctttgctccggtgcgggaacccgagggcgagtcttccgatcctgatggcgattctatcttgggtgccactttggccggttcttccaatccgaagtcaagggagggaagtttcgagaggtccggctgatcgggaatctgatagggttcttcggggatctgggcagcgggagtggccgtcgattctgacgtagactttggcgtcacagccgagggttcagttttcgtgttctccgcgttgctgttcgatggagtttgtagtccactggaagagtcgacagtgtgaggcccttcggtgttcctcatgtcgttgacaacgggctcgaaagtctcctccaatggcgctcgcttgacttcaccgggagcggtgatatcatccggaacatccgagggtctttcagccatggtcttcttttgaccagatggcgtcttgctgcttcccgccttggcgaacatggtaggagcggtcgagatggctcgagtcgccagatcgaaatctcgtcgagcgtgaagtcccgtgcgagcgggtctgagcgtggtggtaggccttgcggcaaccgagagagcggttcggaacatcattgacactgtttcgatccgatccgatgattctcctgttctaagatgctatgatgtccggcgagatgtgatgaggtgaattaatcgacaatcgaggtgaagatggggatgatgatgatatcggatgatgagtcttgacgtcgcgagcgggagagatccaaaaggtcgatcaaggtggaaataattttcaaatctagactagtcgcgccgtcatcgtcatcgctcagtcgtcagcctcgagaagattaagaggttcggggggatcgactcacgagccaggaccaaagggtcaacctatctggaggtggaagatgtgtttggtacaatcaaggtatacggtcttgtttggtgatgacacgcagtcccatgcccgcgacaaaggcagaaaaatgaggtggaacgtgcgagctggcgccaatggagtagcaacagtttcaatcgtcggatttcgatttttatcgttcgttcttgagtctttggttctggggggttgcttgttcttcgctacttcttcagaaacgaagttgacctgtcgctcaagtcgggtgatgtatgtgcgataggtttatttttcgtgttacttgtttattttttatttgtatttctctttgtcttttgtaattcgcgctgcttgttctcttcttcttttatatttcgtcttgaaatctgctaagcggggtatcgcaatgagctgaatctcttattggcttcgtgatcatggtacgtaccttacggtctgaccccggacttttcgtggaatgagaagccgcaaggcgtagggacgagacatgtagatgccgattcgtcgctgcacggtgatgataatgtgctagaaaatgatacgcaaggaccgcgatgagtttcagtagggagactctcgaattgtgtaagcttacctctagcggtaatactcccgttgtcagcctcggagatctggtttatggataggctcctcttgtggcagcgtcggctttgctcaatccgctcagatacgcttctgcaaagatcaattggaggagttaatcgacgtcgagcgagacacgagtcatcacaggccggctcacattgttattctgctgacgcattgtcctggcaccctctcaccggatctctccactacttcgatcggttttcttttccgttcctttcgggtctttctttctttgatttgtttatttgttccttctttctcgcgcccttcgactttcaccttgttccgcgaggctctttttctggcagacgatagtgagatgtctggccactagcgctttgtgtaggtgagtcgggcttattggtgttttttctttttctttttccggtctgtttgtttcttttcttttttcttctttttttgtgtctgcatgtcgtcctctcggtcttgggaaacttcccttttcttatggaccgtctggagtcgatgtcgatacccgggatatgctagaggtttgacgggcgtcaatcacggtcttacgtgaaggagcggcgtcgtttacactcactatcttcccgggctctgaatgcgattggctggcatgccgctgctcgagtccgcgcgtggggggtttgcgaggatgggaaagccgagttccagctctgttgctgttacagaccggtcaatcggtgggctattccaacatcattggtaacgccgtgtctgttggagtggaaggacgttgttattgaacagaaatgtacgtctcgaaagactggggcgacatacgacatcgccgttcggagactcttgacgttcttcagcgcgtcccgtatgtcgggattcttcggtcgcggccgctagtcttgtaggggcagacttcgcaagttcagctgcgaagctagaccggacatccggtaacagctacgcccacatacaagaatgcacaaagctcctgcagataccgatgttctcctatgaattatgactgtctagcgctcaacgtcagtgttcgctcgcgatttcaaggggaccaaaaagagaactcacggtacaactatcctgtgtagctctcttgagcgctcttccctcgaccagcgagcgagcctcagtcgtcccgaccgtccccgtcatcccgtcgccttttgccgcgggagctcgagtcgggaagaggagccttcccgagcgcctggtcgcgcctccggtccacccgctgtgtatcaagatttgcgtgtagatgatacgttgagctagtgatcttgttaggcgcgcgttcgggccgttgacttacctccagaagcaacatggccttctcctggacgttcagctcctcgccacgctccaaacgacgttcatggtcgagtgggtcgtcatgaaacatgacgcgctgggctgggaggagggccggggcaggaggggctgggccgagaggagccgggaggagaggctcccccatactacttccccctctcccgctcgggatcctcgacgatccacacggggtaccgtaccgagatggagacgacccccgagggtcaccctatcgacttgcagagggtggaagccgtacgcgcgttggtccaggcgttcgaggatggggcgggggagggagtgggcaaagccaaggaaggcgcaaagaggaaagggacggtgcatttcttggcgagcgttttcgcgaacatcagcatggtcagtctaggcgatcgacgtttgctttttcttgcattcggccgacgttaccgtcgttgtcgctgtcgatcggtactgatgattaccatctgatcccgttcgatagctcccatccacccgaccgctcctcctcttgccattccccgaattccctaaacccatcaccccggagaccgtctcccccgaagacgaacccctcttgaccaagatcgtcgtctacaccgaacacccggacacgatccgacgaggcggggctctgggttgtatcaagaatgcggcgatggagaggacgtcccacccgttcttgctcgctaccgagggtgagcacagaacgccaggtcgacctagcacagtcatggtaaagctgacaagagtctgctctcagccgatcgagtgcaacatccgactgaccccaagaggaagatcaagggggtggacgtcttgccttgggtcttgtccccgctcatgggcccggaagagatcgacattgacgtgagcttctcgtgccgtctgcccgaatacgaagagaggcaacatggtggctaatgagctgcgtcttgatcgtttgactttttgcggcctatgcaggagggcgatgccttgccagagacattacaattcttgggacctgaaaaggttagggaaagggacccggtcttgcgcatgatgtgcgtcgagatcttgctattgctcgctaccagtacgtccggcccgctccttcagcgtgcgaaagcattgcgcctgatgacccccaccactaccgtcttcactggcaggctacaccggtcgggcatctctacgaaatcgaggtacctacaccgtcatcaagctcgccaacgaggccgagacggatgacaagattcaggatcagatgatcaggttggtcggcctgttgaaacgagacgaggggcaggacacgcagcaggacgtcgtcgagggtctgcaccaggccaaggaggatggcaaggacgaggatgagggagacagtgatctcgagattgaagtcatctaggtcggcaagggcatggatcggacctagagcagccacgatggggcgcgaagaatgtgtacatccaagtcaagtggaatcccaccctgatcaaccgcgcagccaagcgttatttcgagccttcttttcttgctttttctgtcggaatcggtcctatcaggcccgagacgagatgtgatcagttttgctcgtcgaatccgcgccggatcgagccgccgagactcaccatgtcggcctttgtcaacttattcttccccctatcgtccgcccctccctccatctcctttcttttccgttcttgccaatccgcttccttcttctgctcccattcccccacgtcaaagaacactccctcttgcctcttggcccggttggcctcgtccagatgatccaccgtgtactggtagttcgcaggagtgaacctccccgtccgggcgttgaacgcggcggtctggtagcctcctccgccttgctgagatttaggcaagagatgtgccaaagccggatcgataggtggtagacctgattcgacaggtacaccagggatggtagtagggtagagggcggaagatgacgaggatgaaggagcgctgtatgcctgaccccatgatgctacagccggtagaggagcagcaccaggtaaaggaggctgagcaccggggagtggaggttgctctgtaggaagaggaggttggtcactcggtagtggtggctggtcgtctggaagtggtggttgagaggaggaagatgcggttgctgggggtggtgcgagagggttcgtccatgtcgtctcgttggttttcgcattccaaaagtaataggctatcacacacggcgttcagaaagtactatcagctcctccttcttgctatcgatcacaaacttgggcttaccattcgctgtcggtgcccagacggcctgccagccgcccgtgtccttgacatctcctgctgacttttcctcgactgcctttcttcccttcaagtctgtctcggccgaggggtcccagacatcgtcctccttttcatctacaccttgaggtctagtcaccggctctgcttctttgggcaaaggcggtgctgatgcgccagaaaccggctcatccgccagaagtggtgcatcgacagttgttgactcctcttcagtagttggtggtagcggaggttgctcaacctcgggggacggcgatgcgtcagtcacggtcgcacgtttggtttcggacatgccgagtctattcttgatgttgccttgcggacctggaggggtgaaggtcatgcccacggtctgatcgagtttaggtcatgatggatcgatctgaactgatgttcagtcctgggtggaccggggaagggatgagatttgctgacgtaaccaaacagaatcaccaaatgacggaaacataatcgatgttacagctttacatcaaagcaacagaatatggttcaatggcaaaatcagaatgaagcacaacggctcttcaattaatcatgacagtcacagtgacagaagtataatcaacagcaaaacaaacgtctccccgcgatcgcgcgcaatattcctctctatgtataagctgagccctttgacactttcttcgctttcaacccgtttttgggcctggccgtcggtttctgcttcgtccgagactcaggctttgttttggcagcatcctgtttttgcttggcgtctttttgcgcggcatatttcttgtgtcccttgcatctggcgcatgtgatcttcagaccatcctccgctgttctgttgagaggcttgatgcgaccaagaaccacatacatgttatttcttagacgacattcctcgcaaccgtaaacaaagatgcgatagcacttgtattcgaaagattgttgttttgaagtaagcgcttggtgagatagtctgagaaattcccggtcggtatcgtcatcaaccttggacccgtaatgacgacccaaagacttctgtagcttgatcctactgtcacgatcaaaatcgcaccatcgcaaggtatccttgggcgatacaccggacgggctggtaggggctactgtgaggcccccttctggcgcggaatcggtctgattcgttgtgaatatttcgttagcagtttcaccgactacggtgaactcgctgcctccgcggagaatcgagggttccaattgaggatctgtacagatggacagctctgtatatccgggttccaaccccagatagacaggatctccgagttcgtgtaaagtcaaccatgagggctgctcgtgctcataggcaacagacatgttgtgagtcccggaaggcgcgttttcttgtagctgtagttcattgatgtgatggcccgaaataccttgaaaactcggctgctctacaaggtggctgggtggcgggtgatatgcccagtcaatttggtgggcggcgtacgtttctggaatggcgttcagtgagttttcattcgtatcatcatactgcggctcatacatcggtgtctcgattgctggaccaggggcctcgggacatgaatcacttttccaaccttgcggcggcaagatcccttgcgtcgagagaggttgcctttgcggaccatctcgaatgactatctgctggacatccatgggataggtcgtcatcgacgttgtcgatactgcggatacgtcgagtagcgtcgaaaaggcggcgttaccggttggaactgctgttgtcgagtcttgaaatccaaagcgactcgtcatgtcatgcccgtcaaatgcataagtagaaagtgcactgatatagggcggcatgtccggatagtcatagtattcttcaaggctggggagatcgatgagatgacgctcgttcatccttggagccaaacaactggtggatgtatcagagcctaggatcgcgacatggtcgcagcccaagggcaaaatttcgcaattacgcactacaacaaatatatagaggtccggtgagtcacggcgaagccgttacgatcatatacactcctttgtggtcgacatcgagaaggtgcatacttgtccaagcgcaaaaatctgtggacgccaaatacccacggtcaagtttgcgcgaacttcccatgtcgacgtcacgattagcttcaacatggtctgaacaccgtcgactgctgtcacaggagggggatccgatcgtgccgaggtctattctgttggctaaccaccggcgaaatccacagatgtacctcctgttacaacattcttggtaaacaagttttcctcctattcttcgcttagttgagcgtccggtcttccctcgttctgcgtgacctgtaccgcctctccctgctataacagattttgcaagtcatgaagctagcgatcggctccaagacacccttactcgtactctctctaaccagaatacgctggcagacggcactttcccccttcttgtagcgcctcttcgtcccgtcacattttctacatctgatcaccgcaatattcttggcttcggttgcgacactactatcgatcggtcggccatcggagccacaaaacgagatcgggtctatgctcgcgtaatcaatttcgaattgctctttcgacgaatcgagcgcgttgaagagtgcgtggaagaatcttgcgacatttgctgtatatgccttctcctggacacccagcaatttcgcaacccttttgctggagaattcatccaacttctcccaccgttcttggactgcgctacgctcagcgtcggaacgatctgcactgcgcaggggttgtgtagccgtattcaagttcgcaaacccatctttcgcttcccaattctgaatcgaggaatttggattcgtcatgttgctacttccatagccattcgaatccccatatccggcgatcgggtccagtcctacattcgacccctcatacccgaagacagcgggagagtatcgtcgaccctgtatgcccgggtcgatgccgatattgttcgtagactgtacaaagcctggtgtgtgcatttgtccttgctgatagccgacccaggacgctgggtgaccgctattccacattgaggctactgaagacccttgatccccagcgctctgtgtaccgtatgccgtgtgagccataggcggttcaggccattgcgatgaaattctgtagctatgaggatggctcgaggaaaactgcgaagtggcctgggaaggtttcaatgtcccagtctggtctgggtgccaagagggcgcgggatcaaaggaacgagggaatgaaatcggttgggttcctggtcgcgcaactactccttcagatagattcccgggagcatgcaacatggacgaagctgtatctgcattgaacggagggatcaccgatcgggcaggctcggttgttcgtacatccctccgctgataaggatgggcgatttcaaaagagagattgacagggtaagaggacaggtcgtcagccccatactgcgtggctattgaggtctactcggatgaacaaaggaaaatggcgcagtcagaggacagagttgaacatttcgatatcaggattaggcatacctctgttggaaagtatccaggaatgttgccgagctcacgatggtgagcttgatctgacctggcaaaggtattcgtacgcgactcatcggtacttcgtggaattgacggctcggtatcatagcgactgagccggcttccgtattggggcgttctcctctggtcgatgggatccggtcgaaaatggccgtgcgaccctgtctgataatctggcccctcgatgggataggcgtaagtggaaggtagcgatccactagtagtcatcgctctccatgcatcatctccttcctccccattgcgatagatgtaggtaggaagcctggacatttactatgtgctgtcgtcaaccgatgatcgaaactacgcaatttcacacaaaatcaggcaatagtaacggttccactcactcgggattcaatgacaagggtagtccaatcaagtgccctgcttatatactcgtacgagttctgccacgcggcgattagggcaaaacagctgtacattcagcgagaagcacaaaattgattttaattatgattatgtttacgtttgtaattggtaacacatcctttcataaaacgcgctatcgacgccgatagagtccgcagtctcatttagtcactatagatcttgtccccgtaggaaccattccttatagcgatggtgcacaagtctagcggttacttgcggtcatcaacctagccgctgccgatctttctagactgctgcaaggcaccttccgctctcgatatcatcctgttgcagagctctcgtctgaagcatgcagaacatcaggaaacctgcgagatacaccttaggctcttagtagtgttccacatattgcctcacgtatcaccgtatttcgaacatcccaaacattatggattatcgatttattaatcttgaaaacgactccctgaccttgtttctgctatccatgcttcagccgacattcgtgcacctgatcattatcgatacggccatacgggctcttcctggctttcaaagtcatcaagatcgagaattaatgctttccccctcccaacactggcctttttcacatcggatcgaacagtgcttctagcctacaactgcgccatattcgtccatgcggctcgcttgggattttcttgtcctgttatctcttggagccatccgattgagccagcctacacactttaaagacttttgcccatgggagtataccatcgctttggctctaaggtgcgaattttgggtgacacttgacttcaaatcaactttatgtacttacagtccagccagaccccgctgtgtgcgaaagattccacggctcaggaattttgcccttcatacacattggcaagagtccatcggcagtggttctgacgtccgttgttccaggttgtatccgatctacgataaattgcatacggcgctttccgatagctctttgcacgagactcgcagtgaatatctcgagcaccttttactagagttgacgagcagtcggacccagaggctccagaaagcatagtcgacccttgattttggtcgacgatcgcctatcataatcggtctaccagaatctaccgtcgagcccgcaatcaacaatcgagccccctcagatccatcaccttcgtacttgctgttttccgtactgttcatagcatctatggggacctgagcaacaacaatctgatcgccctctgcctgtgacataccggaagaatttggtatgggaatgcgattgaggctctgcaggtatcacatcgacgagtccttccggcagactctcaacgataccgatatatggacataccttaaatcaacgtagtgatatcgataagcgatccttcctcgcacaacgaaacataatatctctttggctcgaattctgcttggcaagacgatatagattgggttgaattgcaggatgacctcatcctgagattcgcaaaccttcgagccatttgaacatgttcatatatatactgtgattatacaccgcgcacagaaacagtaagaccgtgtctgtggtcgttgtgaccaaccgtttaatctttgtcgtcagctattcttgcgtagatttcgcctgccttatcctgccggatgtatcttagagcatgtattgccaagcgtagtgagcccctcgtgtttattggtattcttgtggcggtttaccttgagcatgaagttgggacaatcgggatctttgcattgtgagatttccaatcgttcgcgtcctaggcctgttcctgcatcgaaatacacccaccattggtcggcgtcgaacgcttgtttggcttgccgcagtatctgcctggaacatccgggataatttaaggctaaaaatcctttcgtagtctggtcgaccttgagaagactgtcatcattgtcatccacagattcgcgagggccagtaccgtcgctgggcccggcttgaagcgtcctggtacccgcgtacgagtagtgtctaccctgcgccgcatgtgttaccgaggggtaaacatgctcgttcggctgatatacatttgaacccccgtaattctgcgagaaggatgattggtactgcgatagcataccgaaaccagccgtagcggcatcatgcgacccttgggtccatgtccgagccggccgtaagaccgctgcatattgactctgagggtagttctcgcgaggacggccctgagagtacgagtagtcctccataggaggcgcctgagtgtggtttccgaatggagataagtttctacccggagctgtagcgaaataggacatcgtctcgccaattgagggatcaccaagtggttgagaggggtccttgaatgcgaagaaggggtgtgcagaagcgtccggtccatgtccatagccaatcgtcgattgctggccacgtggcattatgtaccacttggaaggaaagccccgaataggacacgcctgtcagtcaatagtctgacagggttctataagtcattcgtactaacatgttcaggtttctgatagggatagaattcttcagtctgatctaccgaaggaatggaagaaggtgcaccggcgctgtaaccggcttaggggttcgtcatacacccattccctatggcagacgcgtgacagaagcagaatcacacggtgtctgggtagttgatcctttcattttggcaactcccagattgcggctgccacgcgatagtcacgtttagattagtaggcgatccattgaacatgcatgacgcggtaatgactaatactctagagcctcagtgatatcagtgatcagtgtgcagccatatctcagggtattcggtcgacgattgcttatttttgcggcctttgttgatgcaatatgtctgcgagagcgccttttaccctcctgcaccggtctctcattgtttccctgctatgtgcacttgactaatgagccgggttatggtggcagcggatgtgcacttaacacgttacattgcgcagacaacgtcatttgaacgttatctcgaaacatccgtttgccactggtcacgatcacgatggccggttgtttgcgtgtcagttgcgtaatccttgaagcatgtgctaatacagaggtcctatgtatcgtcaagcctgcagggcgagatgaaaagctacactcgtcagagcttaaggccaaatgaatgaagcgaccgcaacggaactgggcgaactgaattggcccatctagtcgtgagtgttccgttgtaggcgcaaagatcgaacaacggaagctatgcgtctatggcaagtgtcgaagctcctcttctcgccgcgggacatactccacgtaaaccgctggtcgtccgagcctcgaaatctcttgtcctcatcgatctcgtttgcgttggcatcggtcgcagtatgcacagcccattgccgtttgcagtctgtcaccccttattaaccggatgacacagtcttttttcgagcaggtctgaatttggagccgtttctgaaatccagggccagtcccgatgaacgcgcctgaaaccgtttctccatcattgaaagcgtccaaggcggcccacaacacgacgtactgtagatagctatcgtcgtccgcaaacctttcgaggcaatcgcgagacattttgtcgaaagaaaggagcaacctctctacccgtaatctgatcatatcaattgagagcttctcttcaagcgagaactggcgcctcatctttccttcgacaatctggacaactggattgttcaccttccatttgggctgacgcggttccttttcgatgttgtcgccctgaaaaccgctggaagatgagatcgggaatgagccgctagatcccagatccgacctgtccccatcggtatggtgatgtttcactgaacccaaatcgttgtagctgggggctgtgccgtgattgaggtcaggatttccaaagcggcgacgcagtagcctcctgaacgaaggtgcttgctcctccgggtgaccatgaatctgagtaatgctccggggtggccccaaattcgataaggatgcttgagcgcatctcacgtcagtttctgattgaggggtcataggtcccggtgcgtgtacgggcctgacgaaggcatttgattcgctcaaacacgagatatttgttattggaaggtgcgacccgtcgaatgacttgtgatcatacaccgttgtgaaggagtttcgatccataccatggagtccaggcagcgaaagaggaagtgtactggctccaatcgtgcaaaggtataggcttccgtctcgttggcgccgagatggttttatcgattcaggagtcaaggcatgcgtctcacttttcaattgtcttgtggccccatcatcgtttccagagtcggtgctctgaggcggagatggcgattgtttacaaaaggtgctatagccagtgtctgatgaagcgggaccatactcgtcgcaataccacccatctttccagtagatgtttgcttgcatcaagttgattgtccagaccggttcgtgggtcgtgatagccgttctcagcctgaattgctattatctgactgcttcaggccgttttgtgccgccattcgttgctcaacgaacgcggcttttcagcagcgaaacttatacaggacggatcttcagtcgatcctttgtctataatttggctccacgatcataccgactgtttcaggggatttctggggtatcctttgcgacatgagcggttcgagtggaaagaaagactgccaggttgaacctgacgggactgagaccaaacagcaaaagggtcaggggcgcgcgtggccgaggacccagaacgtcacgtgatattcaccggcgcttagttgtaaccgccgccatgatgcaagaccaatgcttttatgatcatggccgtgctgtgcattgttattggtacgtagaaacgacttgttactgccatcaatgataatcagatgagaatgatcggcactgactcaagacgtggagctggtataggataaggcatcggggtaccggcacacaaacatgccacaaagtctgccttgctccctggacaccaattgctgcgtccggagcggtatcagcgtatgcggaaacgtgcgattcatcaggttctcgaccatttatgacttcctatctacagttcacagtacatcttcaagctcttatctagaaagcaccgcctcactttacgtcgtgggctagtggaacgtttcccaacttttcaagacaggccacgatcgttttcagaagcgtgttgcacgatttcttgagcaatccgagcatctcacttcgcctttaaacctatggcagtgttcccggagtataacattgctacattcattctgaccgcattcgaagcgtaagaattgtcgacttcctcctcgaccataatcggcagtcaggctagcgccttcggtgtcatcgcccatctggactgcggcattcaggatggtcaatcgaagaagatcttggcctcggtaccgttcgatcaagttatcccatgtatacgtgtcgattcgatctttaaagtcgctaagaccaccctgcacctggtctggagaaggaatctcactgaagtagaagttttcgatcactgtgttcagccgtctccgcacgcggacgatgggcgcttgttgtccgatgccagatggtgctctttgattggaagtgccgtttgatataatctcgcctgagccgtctggctccgagaatccttgagtggaagacgatgtgctatcatcgatctcaaattgacgtattcgcccctgagatagtcggccggggtcatgtgaggcagacccgcattcgaagcctttcacttgggttgcctcatcccgctctctcatgctgattggaccgctcttaccgatctttcggactcggggttcagtaacgcgaccttcaatggtgattgttgtcgatcccgcagcccgcttcgtttggcttccgaaacctctgcggtcctcttgtagcatttccaacgtttgagtttcggagtacacgctgaaacctgcagagctccgtccgaccgttacggcgaccgtatgtccttcgtagatgatatcacagtcaaacgcgctgggtactggtctcatagcgtaattcaagtctccgcggacttggtggttgcgacggtaacttttcgggtcgaatgccgctttctcgaatacagatctggtgtgacctccagtcaaggcggcatgggaagcttctgaatctaccggctcgtcgccaaattttcttgacatagacccctcttttacgttcaccagttcagggctcaaagcttcatccatcgctatctctcgcttggattgatttgtgtctgccgagaaagaccgcaacgcatatcctgaaaactccgtgtccttgcccgaagcatgactactgatcgcgtcgaaaggtcgcccgaaagaaaaattagagctccactccccactcgatccatcggcccaccctgtcacactaaatactgaagggttaaagtcttggcacctcgcttcttgcatgggatttggctttctaacctcttctagcttgctgaaagatgggatggatacgtcgcaaaagtagacacggtattcaattacccacaaatgcagcagaatattattgctcacctgaggcttgttgattatatacgccaagcgattgtagctgtatcgacgtcgagacgcctacctacctcaacttcctttgtctcggttgcgagcgaccgctgtggagaaacgttccgagcggtagtaggatctttagcgcgattcagcttcgttccccgtagctccactcgctggtcgaaggcttgacacgcgtccctatcagattggctggctactacatacaaactcctctatcaaatgttacgagatgatcaagatcgcaggtccaactcgaccaactcagcctcaaaatatggcgtcgctgaacggatcgcaatgtccgctggatttttgaaggcgcccataaacacgtgtcatctttggtcagtggatttagggtcgctgcaatgacgaactgggacactcggagggcttgagaaattttgaaaacttagctccgaaactaggctccgagtctcaggtgggaaaagacatgaactgatgaccggccgtacgtccagtctactacaacatgaccgtatgaagtgcaaagtttgtcctcatatttctttatgtctatagcatagtacacttgttacggtctgcggtgtctcagtccacgacgttgagacgatctagagttctctatcccaccgcgcggggccgtgcgttgccccttgacaacctctgggcggctttgtgcttgcttcttcagttgcattttcctctatgtttcatttttcgggctgtgctacatttgggcaggttctgcctgctttggagctgtttttatgaagtttacgggagcatttcgcttttcccttggggttcttgatccttgcacgcagcatgagctttccacacggtgaaggttcgctgatctgacacttcaacacgaacaaagggtagtcttcactgatcttagcctgtatgttgacaccgggtgcgttcattttggtttcaatgacgtattcagcagcctccaacaccgtcaactgaagtaggggattatcgccgcacgccttgcatagggccgtctcgctcacttcgtcaaatttcttcttggccgcggtcaatttcttctgtacctggccgtgttgaggagcagtatccatgcgatagactaattcggtggtatctcctttacgaatttcgacaggaggcagtcggagagctggttcgacggcgcgagattctccaccgttgcagtgcacgtcatagccctccgggtacgcaaggacgctggggttgatcccggtgccggccatagtccattctgactgttgatcttggatcgtttcgtagctatcgttaataccgggcggtaactccgtattcatgccgagcgtatgaaaaggatcctgggttgactccaaccggagacgcattgactgttcgatggccgataattcatcgggttcggagctcgtgatggtcaggctcagtccggcagtgtcattagacgctttcatcttcgtaggcagtaattatatgaatcatgcagtatcattcgtattgtcaagcgttcccgctatccttatgagaaggtacttatatggggtctggtatgcgcagttggaaagcaatgaaaaagcacgatgtacgctcctttgtaattcggttcaagcaggtcatgcgaccaggggatgaacaagttctatctccttgagggaacaccataagggatactgaaaggtcaagttgaacacctcagcttcctggctgctccagacggccgatcaatcaagtgaaaccgttcgaaacaccactagtccagctagtccagtaggtaaggttcaagcctcgcttcggcatctccgcgatgccgagatcacgtcatctcatgccgtgatgaagtttagcgcgctcagctttttcgggtttcctggagactccagaatggccgggtccacgggttcagagcgattcaactgactcgaacctcgatcttcgaaattggtacagacgtacagacatcgacttcgctacgtttttatatcactgatctcgaagctcaaaggtctttcagaagatttccgttctatatccggaatagaggtgtgacaacggcgtttcaactgagttgagcgatcagctaacatcatcgggtcgaacagcctagcaacttgaatgcgaattcgaccaacccgaagtctcgcattcctcaatttacgacccactttccccaggagcacgatcaacgctttctgtagcacacacaacatgtccaccgcccctcagaccgctgcggagacgtcgaccgctcagcctaacgggaccgctgtcaatggatccagcacgggtggaatgcagtccctctcgaagacgagctggtctgccaagaagcagagtgcgaagctggctgaaggtggagctgacaagcttgacgtatggagcatctttacgtgagtcgcaagcttgggacgtcagtgccagtatcttcaggcagggttcggtgactgaccttgacgggtttcgtccgtgttcgggtagacctgccaacatgccccctgatgcgatcaaccttggtcaagggttcatgagtaagcattgttttaccgcttgtcgatcacccccaggagcaatccgagctgagattggctcatgcacagactggaaccccccatcgtgggtcagggatgcttctgccaaggctatgaacagcgacgtgatgagcaaccattactcgtacgtacaatcattgtcatgtccaggtctggcttgtttgagcttatgtatctggttcgtatactaccgctcctatcccgaaacttgccttcggtcatgcaggcacccccgaggccgacctagactactcaaagccatcagctcgcactactcgccccaattcgagaacttgacccgggagaaccgtcagctgcgtccggaagagatcgtcgtcactgccggagccaacgaaggtaggtctgacaattgtactggattgatattgatttccaggcgagtcgctgacatggcactgcgatcggatcgtgtcgataggaatgtacgccgctctcctcgcctttttgaaccgtggcgacgaggtcatctgcatcgaacccttcttcgatcaatacctcgcctccatcatcttcaacggtggaaagcccgtctacgtcccgctgcaccctcccgaggctcctgacgacggaagctttgtcaagagaactggtgccgattggaagctggacttgaaggagttcgagtatgtcgctcgatacggattcacgtctcctgtttaacatagcgcgcgatcctaaactggctgtgcatcttagcgccgctttcaccgacaagaccaaggtcgtcatcatcaacacccctcacaacccctctggaaaggtcttttcgcgagaggagttgaccgccattgccgagatctgcaccaagcacgatgtgcttgtcttggccgacgaagtcgtaagcctagcctcactgactcgtggatacagagacttgggactaaaattggcgggtatcacgacgatagtacgactgtctgacctttgacgggactgagcatgttaggattgcagccttacccgggatgtgggagaggaccttgaccgttgggtccgccggaaagtcgtttgctgccaccggttggcgaatcggtacgtctctgatcccccttagtatgatgttatccagctaatacggcaccttgaaactacaggctggttgatcggacccgccgagcttactctcgccacgttgcaagcctcgacgagaatcatcttctgcaccaactcgccgctacaagaggccgtcgcagagggcctggaactcgccaccgagaagcgtttcttcgaggaccagatcgaggcctaccaggagcgaagagacgtcctctgctcctactttgaacagcttggattgagcttcactttgccccagggatcttactttgtcttggtcgacatgagcaaggtcaaggtgcccgagggctatgacttccccgaggtcgtcaagggacgaggcagggactttgagtgagtcctgatcgtcgccggtgctgtattgtaccaggcggaatgctaacaggtttaatgccctaattaggacttgctggttcatggctcaggagctcaaggttgtcggtattcctccttccgaggtgagttggattgcgtcgagtcgattagcaaactgcgtacgatactgatataggacattccagttctactgtcgcgagcacttgcaatttggcgaaaagttcgctcgtttcgctttcgtgagttttcacctgcctttggcgcgcccgaaccgatctcacacgtctagctatttgactatagtgcaaggatcttgacactctccatgccgctggaaagaggctgctcggcctcaagaagtacatccagtaattgctgcaatcggcttgtgcgcggactcgaggataatcatgaattaatgaacgccgaatcatcaatgatttatccgcgagttaaagactgttgccgttttggatttgcctgggctccgcttgtcctcctttgagcattggattgtcgagggtttaagtcgtgtttcatgagagctcgtaatgaggcttatactcgcgcttgacaagacgtcttgtcctggctcacccgtttttacaaatctgcagtagaccagcacacgcgacaagcgaataagaaaaccctgtacctcttcctatagtctaacctctttctatcattatgaacacaccatggagcgaagggattggcaaccgaggcccgctgatgccttatggcggcgggcagaaagaatgggaataccaggtaggtggccaggtcatcttccgccaaggaagcgtcgactgatctggatatgatgctggtagccaaccagaatcccaggatatgaggtcacatacggagcatatgtgagtgatagatcgtatgcccaccgctactactagcaaggggactgatttgtgtcgccgcagacaacgtaagtggtccactgtcctgtggataccgggacaagactgagaatccagaggatcgttcgtgcagattacagaaaggtgttttgtgagtcacaggcaaccgaaagtcctgtcacatctcttgacatgctgataggccgagttcgatctagcttgcccgcaggaacggttttgccgggaggtgccaatttcgcgcatcaagcggtacgtgatcgcaggttggctcagcccagggcataaaaaggctactgaactgaaaacctatgccttgctctgccaggtgattgattttcctctgcatttcccggccggtactacaacgccaggaggaatcatggtaccagtaggtcttcgcgtcaaaagcctccgaagaacagtgtgttgaaagattttgacaagtcttttcatcacctaggtatcgttggtaaccaaaacccaggaaaagagcaagaagacgggtccgccagagtaccaagagcctctttgtgtgatacagtagtagacgccacctcatgatggaatgcggatatcatctggggttgttgtcgcagaggtgttgcttcgtaaagtcacgtgacatgtttcgaggttggttaccgcgtagatagtcaatcaacctcatcctgggttcgcgcgagatcaacaacaaacaaacagatcatccttctcccgaccagttcagatcgattcttcgctgcttgctgaatcaacccagaccgaatcgctcaccccatacaatctactccaatatcgtttgagatcttattccggactatggaaagtccgctcgggttctcgccgttcaaaccgagtggcgacgaagcatcgcgcgatctatcgttctatgatcaacccgacgatctctccgccatgacttccccactagcgacacccacctccaacacctctaccatctcccgctcatcctcgacgtcttccctcgagtctctcgcatcggatgcggaatcatgttcctcagtagagcaggtctttttcggaccggtcgggacgaaggagaggacgctcattgccaaactaagcaaggtcgacctcgatgaccgggaacgagtcgaagagaggcaatttgacaaagagaactcgaaacgacgggcgacgagacgagactccagggagttccatcggaggaagactctagtcttttcgtccagagccagtctggcgaacagtcctcggccctgggggaacgggttcttctttaaaggcaagtcgcaagcagagatggaagatgcgtctctacgagaaagtcgctgactcgagacgagacatcctcagatgacacgaagctccctcagtctcctttagccttcaaattgaatgaggagtcaaagcgaccttttttccgaacgaacacgcctgacaaggcgctggttcatacggaagcagccgagccgtccaggtcgagtaccgacgatctcaacccgttccttgaggcgtctgatcgcgctctagacgctcctcaggacgataaaaaagtcgcggaagacgagcatgcggagcatgaactcgccgatcaagaagaagcccacggggaatcaggatctgaggccgataaccaagaggacgagctcgacagcgaatccaatgccgaggttgaagatgaggatgatcgacctgccgaggaggaagcggagtcgacacttcgaaacgacgcggagaggaccgtgctggaaggttctgcaggatctgttcagctcgatatggattcacttcggcttgacgaatcaggaccgtccagcgatgatgtaacagcggagatggctcaaaccaaggtgctcacgcaggtggacgagccggcgaactcgccttccgtacgggtcgacgaagccaccgagtctgaacaatccacctcagtacaatcgcagggtgtctcttctgaagcaaccagttcaagacggaaaagcaaacgactagaaagcaagcgcttgagagccgctgaagtcgatatgggatctatccgttcagaacactcggatcgcctatcgatagagcagacgcaagtcttgaccggtaagtcaaccgcgaactgtacgatagagctataaggtacttatctttcgtctaatcgagtagacgactttgcttcggatgaagagacggaacaagatggtagactccaggctggtcaggcagacgatgcgaacccggaatcggaacaacgaacctcagtccggtcaaattctcaggttgttctctgtgtcgaagatgatggccctatcgcggttgacgagctggagatcgacggtcctgcagagccaatcgttgattctgcgagcaaagaatcattagaggattcaagggatcctgaggtcatcccagtcgatgttacagaaacagcggatgacttgtcgataccgacgtcaatagcggaggaagcgagcgaaggcgctacagactccgactctcagctgcttggatcgagttcaatcgatggtactttggagaaagtgaaaagtgacgacgagcaggacgagatgacccagacacgtgcaaccccgaatggattagtcgagccggtgggattcgcaaccccttctcaacaatcggaagccggcgaaacgacctttgacccagaatcacctatgccgctctgccgagcgccgaaaccggagatgatgaaaggcttttcgccgctagacaagcgggacatggattacgatgtcctaccacttgggagacagtcgtcactatctcccgtcgcgcacgtatcaaatattgccaaattcaacctgggctcgtttgacctcgccaaggatagtctcgggtcgtctaccttgcggataaggcaggccatttctcccgaacagcgcaacttgttcgcttctcaacacagtttcccggcgaccccgcttaggaccccttccaaacagcaactggaagcgcctcgctctgcctttgtgcaacgttcagttgcattgcccccggtcaccaagacgatcgagcgcaagttgaaaaaacaaattacacctcgcaccgatcgcaagagggacgttgcgagtgatcggcggatccgcaaacagctgccggctatgactggaggagcatcaacgaccgtagcagtaccggcggagtcaaagacttcgctgatcgacacaccaacgagaagtaggcgaaaatcgttgcggtcagctgttgcctcgactgtctcctcggaagcagtcgtcatcccaagtgccaacgtggcttgtgaaacacagcacagtccgccgtcctccgaatcctctatgatagtagtccaggccactcctgtcaaacctataccagttcagccggtagcctcgtcctcgtctacaacagccaaagtaacgcagatcaccgacagcaagctgaggcaaccgacaaagtctcttctgaagaagccctccgcgagctttttacctgttctcaaatcggtcgtagtgcctctgcgtacctcgacaatcgcctgcagcgctcccaccgttccagctttcagcagcattcccccttcaacttctttcgatttcgctcaaccgcttcccaaccagaagatcaccaactttgcccccgccgccaggagtcgacccgcattacctgctgctcagaggagccctatcaaacagccggacgttttctcctcccttggtcctccaatcaggcctacccaccgtggccccatcctgtcgacgtctagaggcccccctgtgcggccgaacatgactccggtgagaggcggcattcgagcctttggctcacccgttcgctccaacatgtctccaatgaaggtaagccgttttgtcgacgtacctgtcagattgtatactgatttcacttgccttgacgcgatcggcagaacccgatgctcggcacgccgcaacgcgctcatcaccatttgccactaagcactccacagcaggtttctgctggagtggactcgcctggtccagctgcaaggcgcctcgacctttacccgggtcgcctgcaagcgtccattagtagcctattgccggacaggggctttgctgttacggccgaggaacgatctgggcaaaaccgatcggacaccttgcctcgatcaaagatggctgagcatatcgatgcaggaccatctcaggatgtctttgagagcgtaccaccgccaccgcaggtggttacagcgcctgcggcagcgccttctggttcggcgacagtagaggaatccatcgcaccagaggcatcagtggcgccaacggctgccgccagtcgacgatctgctcggcctgcacgcaatgccgtcaaccttgcatcctcggcgacatccgaaccggtcaagccgagccgagcggctgggaaacgtgaacagcccaaatctgcatcatcgtcaacgtcgaccaagcctcctgtggtggtcgatatcgaatcagtcaccaagctcaacaccacacgtaatgaggttgtgttctcggcaatcaccacgatcaagcaacgtcgtcagggtgagcgaccgcggggggacattttgacgattgccgaaaagatcgcttcactgagccgtgaagagcgagcgctgaggcggcagttggaaaagtcgggcgccacgtcagaggacgaagagcgaccgagcggtcctctcgacagtcatcgacgtggtcctggcgagaccgaagactacaccactccggcgcgaccagccaagagggcccgggaagagtcggaatcgcccactcgtggtccagcttgcaagaagagcaggacgatcttggctctgcctaccaaatcggccttgaaagaggaacgacgggtcaagtgggacaagggcttgatcatgatcagtgattcgaggaaaacgtccagcgaggcttcatcgcaaagtcagagcgtcaagggatgcctgaagaagactgtgagtctggtcgaacccaaaagggatgggagaggcagccgtgttgacgaatgattgcacctctacaggtcgtcttggatcacttgggaaatgtccccaatgcgagtctcggcgctccgggcttacagccactccccgtagaagtgctcaagatccggtacgatggtgaagatttcagcgatggcgagcccggcgagacgaaagcgaccaaacgaggcgaaaagggaaaaggcaggaaaaaggccacggcgacgaccgttactccgaccacgacgacgtcgtgaacagtatattcgacgtgacgagcgaaagacggacccgatgagcggccgaaattgtatggaatccgaaactacgtgcgaaacccgctcgaccttgtcataatcttgtacccggaccgggcctgactgttgtacattcacggggaaacaatgcataatcgtgacacccaggatcgtcctgcgcttctttccgattcctagtttttgctctgaccgagaccggcggcgtgtaacgtggccacctggatggcgcgtgctatggtcgatcgaaccttgccgtcttcgagggtgaggagaccggcgatcgtgcagcctcccggggctatcaaggcggacgtggttcgcttagcaagacagccgggatggagcggaattgacactcgacgaggatcgatcactcactcgtcacgctgtccttgagctgagccgggtgaagaccggtctggagggccatcctccccgtcccttgtaaagctatgtatcgcaagaccgaaagagcatcagcctcgctgacctcttaatcacgaacagacgtcgaacgactccggactgactctgcgcggccagctccaaagcctctgctcgtggcaaacccatcatcacgcctccatcggccatggcctcgagcacgagcgcgacgaaagccggaccggacccggcgagggcggtacacgcgtcgaaatgcttctcgtcgaggaaacggactctgccacacggggtgaagagggagaggaggatttgacgcgagatgggtggagaagatgtgggtggaggggtgatgaccgtcatcccttcgccgatctgcaagtacaggtcgagtcgtcagtcgggtgtcgggtcgcgggatggcaggaacgaagcgataaagactcgccttgctaggagtgttgggcatggctcggagacagaccgtactcgctgggcagagctccttcaactgttccatcctcactcccgcacagatgctgatgaccatcttgccctccaaagcctgtgccatgccttgctgcgtgaggatccctgcgaccatctgtggtttacaacagaggaggatgacatcgctcttcttgaccgcctcgaggttactctccggtccagccgagacctggattccttcctttcccgctcgaccggattgaacgtattccatcgcgttcaacgtcttgctcaacttgcgtacggtctcttcccgcccgaccgtagcgatgaaccccgaaggcaaggacgcctcgggtgcggagagggagaaggattgtgtaggggtagagaagcctgatacgggttccgtgggagtttgaggatcgaggggacgggattgaagagaggtgaatactccagagaggatggcgatacccatggtaccgcatcctgtagagaatgtaaacgggaggagtcagtgtgtgatgggcagcgcgggctgaattggcgctgcagacttacctagaacagcgagattgtaacccatgattgacgtgaagatgctaagggcgtttgtgtgagtgtgactgttcaattctgtttgcaacagcttgtcaactatgcatattgtcaatcgactttcgggtcggacctttgaggatgttcgagtgatcgcgaggcgaatctttcggaagctaattcggtaggttatttacttccgaaacccccttcgtgacttgcttatgtaatcattgccttcttcgctttccctttcggatccgccacctagctcgtcccgttcatcttgctaaacatatcagacatcagacaggttgtacatatcgcaatatcaatagctctatgttatgttttagaacatcaggacaatccacacacacacttatcaccgactctataatactcgcaaaatggcttctcatttggccaacatcttgtgagttgcccctcctgccaacccttgtcctgacccaccgctcacgacgacctcgaactttacagcggtacggaacaagaccgagtcaactgttccttttactacaaagtcggtcatccctcgaattttctcgccgtcgaattgttacgctcataatacccctcttttgccgctcagatcggagcatgcagacacggagaccgatgttcccgtaaacacatcaaacctcccttttcccagaccatcctcctccccaacgtctaccagaacccggcacatacgccccagggacagaattggaccaaagaacagttgcaggcggatttcgataggttctatgaggacttttacatgtgagtccgtgccgaatctgtagaaagctcgggtcgagtcgaataaacccagtcagaccgcattcgcttacaaacccccttcaaccgacattgcctctacacagcgaactggccaaattcgggcacttgcacgagatgcacgtctgtgacaacgtcggggatcatttgcagggtaacgtctatgcgcggtacgagtgggaggccgaggcgggcagggcggtcaacgagttgaatcagaggtggtacggcggtgagtgtcgacgtgccttttattcggctcgacgggatcgaccgagaatacctggttgtgcggaagagcgggaaagcggtccgaatgtaaaacgggacgtcgagctgacgacttgtttcccgtcctgctggcatgacaggccgaccgttgtacgccgagttgtcacccgtgacggatttcaaggaagcttgttgtaggcaaaacgaaatgggcgaatgtactcgaggagggtgagtcgatgcgtcttccttctctgctcgattcctgatcgccttgtcgcttaccaaccccaatcccgacccttgccctcgtcctcgccctcgacctcgacgtactcgcgctcgttatcacaggttctgcaactttatgcacttgtcccaccccacgctcgacctcgtcaaatcgctggaacactcccaacgcctcgaacgccgtaaagtgcaagccaaccctcctcaagatcaatctggtggcgctggtacgaacggggccgaggctggtgacgcgctcggttgggtgccagggaggatggcgacgggaggtggaccgccaggtggagatgccgggtgggtaccacctgcggctgcgggtgacgagggaatttacgagggggatagctggaagccgagttattgaaacctcggcggatcgtggtgattgtcgtttcgtgttctgagcatttgtgtagaagttcatataggaatatttaggcgagtcattttgagagcggaaacacgttggaagtccactcgcagcgtcgactggccacatatggtacagaagcctgaaagcccgtttgaaacaacgccgtcttaggtgtctcctcgctctcttatctccttgcgcacgagtcagcttaacctacccacagtctccgggcccatactgctagtcctttgccgactctcgacgcgctagacgaccgcatgctcgagatcccggatccaccatgtccgactcccgggactccttcgaagcctcgagcccacgccgtgtcgacgagacaaaaaggacctcctggataccaaggacccgacatcctgtgatgagcaacatgacgaacagcagacgccgagtcccggagttgactatggccatctcgtatgatttctgaccgtagactgttccttccgggatgtagcatgaataatctcccaagcaatgtcccacgtatgacttcctcgaacgagtcacagtcgttttgggtactgataataaaatcgctcatgacattccagggttctaaccagacgccgagatctcatccggtagtgctcacaagggcgttgcgcgtgatgaaactcgccaagcttgacgtgctttgacttgctgcatcaatcgatcttcggccgggatgagtaacgaactccgagagttggagaattatctcaactgagcgcgttgaacgctatcatcattgtgatatcagcggctcaaatcagcgatgttgtgcagcccagcgtatcgatggcggagccagctataaggttctcgccgctctcgctgaagagcctctcgatcatatatagtattgccaccggttgggctggcgacttcgatgcgccccgccggctatcttaggggatatcgagacctttcaggaaacgttcgagaactttaattcggaaagggatgtatcaaatcccggacctgagactccaatggagctgaagttcaccgtctctcgatggcgaggacgtggctgtaccgcttgaaaacaccctccgtcactgaaccgacggacgagtacctctggcaggcgatggaaggattacaatcgatagaatcgttcgatactttgagaatgttgggcccgaagagagacagatcgaaagaatcggtttttagtggcacgggatcgtcgggcggcgggacaagctaggtaagttaggtttgaactcaaacgcagcatggcgcttatgtttcaaggccagagcaccgaggcttcaacccacacgggaggtctttactttgaggggttccaggctcacggggaatgcgggtcgacctgccggacaggggatgacgatcgatgtcagtcccaggagtgcagacgatgaaactatcatggtagctcgcgagctcgatgactgagtccctgattcaagtcatacgagctggccgacgttgcgacatgatacatcgcccgtcctccgccgctcacggtccagctttcgatggatgcccgtttgtttccttgtgctggcccccgccgttatgaccgccccctgccgcgtgagagagatgacgtcatggccgtttcagcgatcgggggacgtcggccgatgtgactagcagggcgagtagggtgaccgactacacttgccggccatcgtcgtagtcgtcgtccccgtcccttcgaactcttggcccggcaagtcatccacacaactcgttataaagacttcggttgtcggtgtcaacaccttctcacactcatcgaccccgtctgcaggtatctcagaccgtaatacagagagaaatagtttcatctccatcatggccatctttagctcgctcaacagcgtccccaccgagatcgcttctcgactcggcgggatcatcgctttcaagtgagcgacgtgtggcccatcgtgtcattcgcaaaccttactcaaggaccatgtctgtctctctctttctctctatctctgctcctgttatcgcgcgtcccgtagctacctcgtccaggccgctttcgcttcggtcgccatccccctccagaccgacaggttctatgacctcgctggctccctcggtttcatctcgacgaccatcgtctcctcgttctaccccaactttaggttgatgctgaacaacgccaagacgttcggattgacgagcgggaggatcgcagaggggttgacgagcgagatgtggaaccccgtgaaagtgctcagcgtgagacagatggtcgtcggtgggatggtcatcttctgggccggacgactcgggtccttcctcatccaggtgagtggggtggatagtcgcgccgtttcccgtccatacccccggggcccagggcaaacaagctcatcgacccgcgctcctcttcgttttgtcactctaaatagcgtatcaccaaggcgggccacgattcgcggttcgacgatatcaaggttgaccctctcaaattcgccggagcgtgggcgggtcaaggtacatggatcctatgctctggactacccctctggatgctcaactcgatcccttccagccgacaccctcggtttgggacggctctggatttcttggggttggggatctgggcaggagggttgactctggagatcatcgctgatcgacgtgagtaggcgcactggggtcgtcggagtcgtgcggtgacgtgcagtgaaggctcgagctgatgccacggatcgtgtcactgcctctacattgcgggtcgtagagaaatccgcttggagggaagccaagaatgagaagaagcacgacgaaaagtttatcaaggatggagtatggagttggagccgacaccccaagtaagcagcgcaaggccatccagtccacgccgcccggtcatagcttacacctcgatcccggtcgcgatcacagctacgccggcgagatcaccctctgggccggtctccctctcatcgccctccccaccctactcgccaacgccaactcggccatcccgcttacctcccgcctcccaggctactttccctacctagcctttgtcccgcccgtgttcgagtacctcttgctcaactacggtagcggcgtacctcttctggagaaatcggcagagaagaaatggggcgcggacaagggacctggaagttgggcagagtacaagagcaaggttcccgtcttgttctccctgcctggatccaagatctagtgaggggcgaggtaaggggtgtctgatctcgcactcgacgagtctggtaggaaaagggtccggctcgagacgatgtgccggaagtaaatacgtttcggaagtaaatttacggacgggtgacgagccctcggtcgaaacttgtacaagagatgcaaaagactgtgtttgtggtcgagcttgatcgatcgaggagactgaagttgcgaggtatgagacatgtataatcaatggaaagatgttgaagatgtgatcgccaggtagagaggtagctgctggctgtgtttagcaatgaatggactgtgctacagtcgctagagtaaagatctccgacgacatcaaccagaatgtgtgtgtccgtccaactgcatctcttgacgacgcgggttggcttgcggatggggaaatttggttgggcgacggcggaaacgcgggtcaatccggcgtgggagagagagacgtcaacgacgatggcgacggcaacggcgacgaggggtgtcaagggcatgtcgaagatgaggcgatttgacgctcgacccgtacaggtcgatcaggtgtagaacgacatactcgacgagatagactcgtatttacgacccctggtaccatctatcatatagtccccagacatagaacccccgactttgacctagttgcacgacgcttgacgtttgtctagccccccgatccacttgggttcccgtaaaccagcccgaaggtcagaggactagctgctgcgcatcgtacctcggtccccttccccggtggttgaccacgaaatcgtctcgagctgggtctcgcacggatcaggaaagagcagggtcggtacgacgatcataatagagaacaagaggccgtgggtgatacgacgtggggtgaaatagatcgttggcgtcctggtgagtctggaagcctggggtcccctttgtgacggaatcgatcctggcacctcgagatgatggcctcgcaagtgagcgaatggtactgatgattagctctggaaccgttcgcagaccttggtctttgacaacaaagctcgagaaaaggcagtgacagtggatctcctatagccgacctcgactgattcctcccgagaccaagaacatacaccctcttcggaaccggtccctaagcctgcaaggatcatcgaccctgtctcttcatctcttattcacgtaacggcagtcgagagagaaaggtcggaacgatgagcgatgagctcgggaactgtgagtggaatagctttgggttggaaatctgagtctggatctgtggaagagggtggacgaggccacagtggtcgagggaactttttatcctgataaagctctaggaagaggacctggggggggggggagagaccatgagaccgaaaactcagacatgaaagagatctcgagcggaaaatcccttgcgctggttccccttcgaagcgagaggaggccgaccgaaactgatcactatctgaccttaccatcacgacatcagcgaacggatcggcggtgtatcagcatcaacccgtctcccatacggtgatcacctcgggtcccggatcatccaccccggtcgcatcccaccctcagctcggcgggaagacgatcctcgtcccgaatcacgcacgagaggcttatcagagcgattccgaagagctgaccgaccccgatgctgaaggtcaggaggaagaggaggctgatgagagcgatgccgagggagtgacagatgatgcagaatccgagcctgaagcgcgagtcaagacgaatggagcgggatcttcgtcaaagaggacgaaccatcgggtcgtcgacagcgaggagaatgacttggacgcgcaaatgtggggacttaggagaagcgtaagtcgtcaataccgtcattgcgaaagaggtcgaggctcattgctgcatacgatccggtactacagggccgagccggtgacaagcgctacgacgaatcttccggatcagagggcggagctgcagaagcggtcgaagaggattatgatgacggcaacgtcgacgcttccggagaagacgaagatgtggaaatggacgaacctgacgaacctgatgacgatgatgacgacgacgaggatttcggagtcaagtcgagcaagaagaaaaaggcggggccggctcccaaacggacgaccaagcgagcttctcctgcatacccaaaaggtgcgctcttcatgaacgaggtcttgcccatgcgcgtcgattcacttatgcttctcatctcgctcgattcgtcagaatcgtcccctgggcagtggaaatcgaagactacgaggatcgaggcttccgaggatgaagattatgcgaaaaagattcatcgcaagaagaatcccaacatcagcaaagccaaacgtgcctcgcgcgtctcatccgtcttcactaacggctcggactccgaggctttcaaattcagcagaactggcaaacagatcaattacaacgaaaaggaggtcgattatggtttaggagagagcgaggatggggaagacgaggtccggccaaaggcgaatgtcgatttcgagggcgccgaggccgacgagatcgagggcgtcttcggctgggcgagggacgagaacaagttggacgatcccgtagatctaccctacgagaacatcgtaagcagtaatggccggctgcctctaatttctcttgctgaaagcacgttcccgacctctcttgccagcgtttccacatcaaatggaagttcttctcacaccttcacaacacggacgagttgtatacattttgcaaatccgagaattaccgcggtttcaagcgtttggacaactatatcaagtcgaccttcgcctatgaacaacgcatccttcaccctggacctaatgactaccagccaacacgggaggatatggagaatttccacattgagcgagagcgaaagagggacgagctggagagctggcgaaatgtcgagcgggtcattgcgacgaaaatcaacaaggagacgggcatacgacaatacctttgcaagtggactgggctccaatatcacgagtctacttgggaagacgagcaagatatcaaggagcgtaatgaagcagagatcgccgagtactaccatcgacagcgaaacagtcgcaagccatgggagtcggcagtctatccacctggacggagaccgacgtacaagaaaatccccgaaatgcccgaatacttgaagccgggtggagagctcaaggagttccagcttactgggctgaattggctggcatattcgtggtccaaagaggagaatggaatcttggcagatgaggtgagtcctcggcgaccggggtagctagtggatgaatggcactgacacagtgtgcacatcagatgggtttgggcaagacaattcaatcggtctcgttcctttcttatctctatcatcagctgcaacagtacggcccattcttggtagtcgtcccactttcaactatcactgcttggcagatgcagttcaagaaatgggctcccgatctgaacgtcatctgttatatgggctctggaccgtctcgagagattattcgtcagcatgagttcggtccgatcaaaaagttgaacttcaacgttctcttgacgacctacgagttcatcctgaaggaccgaagtgacctctccatgatcaaatggcaggctcttgaggtcgacgaagctcatcgtctcaaaaacagtgaagctcagctgtacgaggctttgatgagcttttcaacggcctcgcggctcttgatcacaggaacgccgcttcagaacaatgtcaaagagttgcttgctctaatgcatttcctctcgcctgaaaagtttgctctcgcaaacgatttcgagctgaacgacgccgatcaagaagtcaagattcgggatctgcatggcaagcttgcgaccttgatgttgcgacgtctgaagaaggatgtcgtaaaggaaatgccaacaaagtcggagcagattttgcgggtcgagctgtcgcctatgcaagcacaatactaccggaatatcctctcccggaacttccaggcgttaagcaaaggcgggactcagcaggtcagcctgatgaacgtggcgatggagctgaagaaggcttcaaatcacccttacctgttcgatggagctgaagccaagagcgatgtcaaggaggagattttcaagggaatcgtgatgaattcgggcaagatggtcttgttggacaagctgctgactcggctgaaggcagatggtcaccgtgtcctcatcttctctcagatggtccggttactggacatcatgtcagactacatgagtctcagaggttacatctttcagcgattagatgggacggtcccgtctgacatccgaaagaagtcgatcgagcacttcaacgcgcctggctcgccggactttgcgttcttgctctcgacacgagcagggggtttgggaatcaacctcgagaccgcggatactgtcatcatttttgattccgactacaaccctcagaacgatctgcaggcgatggctcgagctcatcgaatcggacagaagaatcacgtcagcatttaccgattcgtaacgaaggggacaatcgaggaggatatcttggagcgggctcgtcagaaaatgatcctagagtacgccatcatcaaccagatggatactgctgggtctcgtttcggtgcgaaaccagtggcaccgaaggcgaacgagccgttctcgaaggacgagctgtccgaaatcctgaagtttggtgctcagagtatgtataagactgatgacacccagcaggcccaaaagttggagcagatggacctggacgacatcctcggcaaggctgagaatcatgaaaccgaagcgacggcagaggccgtaggcgcatcattgggcggcgaaggtttcctttcgcaatttgctgccattcaagatgtcaagaacgatctttcgtgggacgacatcatcccactgtcggaaagggaaaagctagaggcggaagacaaggagcgcgaacgccaagccaaagaagcggaacagcaggtccgaaagcgcaacgctgcgccgggcccaggcgcgtacgagggaatggatcatcagaatgaggaggagtcaacaaagcccaccgcagctagtaagaaagcaaagaaagaagcggctgtgaagaagtcaaaggaggagcagtcgaaggagctcaaaggtgagccatcgccccgttcgcgattacgttccgagccttaaacatagcccttctaccctgtcagaccgtgatatccgtgcgcttgtcaagggaattcagaagtggggtgatatcacggtccgctggaccgaaatcgtgagttgctaacccgccatgtcgaaggtctcatctgacgcgacgctttccccactttagatcgaggaagggaaactgaaagagaaggactttgacgttctcgtcgaggcgtgcaaagatttggtcaggcaatgcgaggaaaagatccaggagaccaaaaatcagttggccgagatggcccggaatggcgaacccatcagctcggccgcccgacagaaagcgatcttgatcaacttccggggcatttcggggatcaatgcggagacgacgacgacccggtggcataatctgaggtttctgcatcagcatgtgcagaagaacagcgttttccaagaagaccccagtgcctggcgtataccccacgattctctcaaagcgactccccattggcacgtcgaatggagcgccgttgacgatgcccacctcctagcaggggtgtacaagcacggcttcgcaagctgggaagctatccaggcggtgcgttctgtctgatcacgctccgatgatatttgagctaagcctagacacctccatcaggatcctacgctcgacttgcaagacaagttctttttggctgaccccaaagccgagaagaggaaagaacagcaattagccaaggaagcaggcgagcaaggcacagaagcggcgccagccgcggcaccgcccacggcagcggccagcccggagccgtcggagaaaaagggagccaagaagacggtaccgaatgcgatacacctggttcgacgagcggattatcttagtgagtgtcttcgactcgatgcgttcagggtaacgatcggtcctgaccctccctcgtgtaggcggtgtagtgaaggagtacgaggagaactacgagatctacatggaacagcagtcccgggccaaggaactggctgcgcaatcatctggtccttccacgaacgccatcgcatcaagctcaaagccacgtatcgcaccgaaacctgcaaaggtgaccaagccagttgtgaaggcaagggctccgacaccgacttggactgaaagcgaagatgacggatagtgagtttagagattgtgcgtgacaaatgaggaatcgcattgagccggattctacaccgattagcgactccatggacgagaagcaatgcaaggaagagatgagacctgtcaagacgcaactggtacgctggctctacccgatagaatgccgacagtcctgctgtgtgctcatggtgatccctactgcagcgcaagatgaagaccggaacagatcatttgcaacgggacgaaaagctggctgcactcaagctatgtctgtcagcgatcggacatcggatcgaacaggttgcgaaggaaaaaagcgatcaagggctcgacggcgaaaaatgccggaagcacttgtggatgtgagcgtcatgtcgggacgtcaagcaagggctcgcaaatactgatggatcgagttttcatttacagtttcgccgcattcttctggccgcgtggtcacgtggattggatcaagctacaagccatctatacgaaattgactatgtcacctgtaagttatgctttgtttcgcgtgaccagactttgcacacggcttaggcaaaaacttcaacagacgtatagcgaggtcgccaacggttcgcccaccgcagctggttccaccgctcttcctgctgctcccgccgcatcctcgacaaagaaaaagaggccagccaagatcgtaccgaaagccgaaccgtccgacgaacaaggtccggcgtacaagaagatcaagctcattcatcatccctacacggcagtcgcagccgcccagccgcaacttccctcacagtacaccgcgtttgccccggcgcagtctcccgaagcaaagaaagaagaagagtcgaattagatgggccttcggctttcgacccgctcatccatcgcattagtgtcattattgtctccctcgcggagacacccgctttgtattgcgcacatcacaatccacaatcatcatattggcaattttttactgctctctgatccctgatctctgtcgctggagacaaacgtgcctcaagcagatatgcgatggttgcctcctttcgatgagtaaaaggtcttgaacgccggagtttctttgacggaaaggagggggatatcgtctaacgcgcttgttcgaagcggaaagaaggtttcgcttggcaaggacgaggtggatctctttgttcccaaaggacctttgatcgtctttctccaagcgcggcaacagtaaaagtccccttggcgaatcgttcaacagctcaatagggaatattcgactgcaatttgggggttcgatccatcgtcggcaagccagtcatttcgaattgctcatatggatcattccactttgctcttggtcatggggtgtaatcattcagttatcgtacgatcgcgactcgacatgcgatggttacagctgattagacagcttcacagtgatacggaaacggctatatatggctggccatgtccatcgaactttcttgtaagatatgtgcgctacttctcttctcttcataatttactacaaatcactcgctacccccgacctctcccctctccaccccacccaaaccaacccaaatcttcacgatgcacggaagtgttcaactcgtcaatcaagcctgcaactgcgctcaggttcgtatcgtatcgtatcgcatcgcatcgctagcgtccgtaggttcggccgttcctgacaccgccgctcgttcgttcaacttcgcgcagggctgtcaagcctcttgctgctcgtctaacggcggcaacgggaactgcaacccttgctcctgctcccactagactcgctatcggacggcggactctagacagattccaggcgagtgtccgctcatcgtcggtgccgtccagaccttcctgctaacctttctctcctacacatctcgctctagatccatcggaacctctgtcgaagtgaaacgtctctcgcgtgacagtcgaacggctcgcctcccctctctcgctctcgactccgaatacgactctcactcacgacaatttttacgaaggaaggatgaacggctggacggatgaccggatgatcgttcgaacggcggcgacgtggctcgaatgtaattcggatgtttgttcatgctaaaggatgccatttgttgttgttttccgactcgctcgctgaacgcgcagccgggtcgatgccccagcgctgtacattatgctcagaaagaacctatgcgagtgattaaactgatgattttcctcttctcctcgacgtcaggcttgtgcgcgagccagaccgtccatcctctcgcccttccccctacaatccctctccaccaggattcgtgtctcagcaatcgattactttgggggctggcagccacccatcttgggcggtgcttctcctgcgggtctagccaacacacggatggtctggaccgtggtgtagatcgtagtgatgataccaaaggcgagaagaccgatgtcaagcgctttctgcgtcctcgttcgggctcgaccctttaggtgcagcatgggtgggtaaatgaagcacaaggggacactgtgagagcgacatgttggtcatcgaagtcgtcaagacgcgggagtaccttggcaacttaccaggcaaaggaaccgataaagctgacgaagccgtccaaattggaggcaccggcccaggagatcaacgagcacagcagaacgatcccggctcggaagatattcttctcccacttgaccttgggatcgtgtttgcctgatcgcacaaagataccgttctcccagattcgtacagcagggaagagttgtaagggaagactgtgcgcggaacgaggtcaacatcgaccgggcgtgtcacgctcatgcagcagctatctcacctgagcacgatggcgatggtatacaggaactgaacaacctgcacaaacttgtcttcctgaggcaaattgacgatgacgacggtctgaatgttcgacccgtaagcggcgtatcccatgacaccgaatccggcaaagagcgcggcgacgccgatcatgacaccagtcaagaccttggggaatttgtgaggttccttcatggcttccgtgatggggatgagcctgatggtgtgatatcaatgccatgagccaggatacggatagctgggcgttcgcgcctacccgaactcacaagccgataccctcaaaggcgaaaacggccgttccgaccatcagggaaaagtccttggcgttgaaaagctgaacatcggccacgccgtgcttgactatggtggtgacttcgttggaaccgatgtagatcactgcaaggaatgggcgagttgagtctgatgaccagcacacctcgcgctttgagacgaaactcacgaccgaccaagataaaggcatcagcgatcaacgcggtcgatgacagtgcggccaagtttcggaacaagctgaggggcaagacgactacgagctgggcagcgatgaggtacttgatcgggataaactttttgcacttggtgactccgaggacgaatgcttgcaggttctcggcaacgaaaatggtataggctgcgagacgagacgcgacgaaggaccgtcagctcgggatcgacaagcttgatgcctaggcgggactcaccacagacgaaaccgatctgagagagcgcgatcgaagtcaagatgacctgacggaaccagttcccatacaacgttccacccatatctgcgatagaaggtgagtatgggatgtgctgggaaggccctcatgtatcgaagcaaagacacacctccaaaagagccgggaatgaccaatcgcgtcttgactagtaacaaaaaggaccaaagcgagatggcggcgataccgagcatgacgatggtcgagaacaagattccaccgttgaagaacctgccgataacaacgaccagttcagcgaattgttcgtcgaccgaggtatgcgaccgaacgagacgtctactcacgctttacccaagaacaagaccccggttccgacgaaacctttgagcaactacgaacgtccactcgtgtcaatatctcgacctgaccaggatcggcagtgatctcaccatcaggacggcctggaaaacggtagcgtccccggtcttgccgacgctcttgccgcgtttcagcctggccacgctcttccccctcgtttgatccctcaagaggggcgcgcgttcacccagggcttcagcctcttgcctgttaagctgacgttgtcggagaccggacgaagcggggccttccgtgttggcctcttcgtcgaggtctacgtcgtcgtcgtcttcatccagatcttcaccggcctgtaaacgtagacggagatctggaatgagtccgggtttctcgaatgtcacaagactcggcgcctgagccgactcacgaaatgcccgtagaggaacaaaaagtcgacaaaacttctcaggaccacgggttgatcctcgcccctctcgacagcgcggtgaatgacataatgacgtcgcatgccacccggctcgtgtaacctctggagggatggatcgaggtcgcgggtcaagctcgaattccgctggacggccgagagggagagggagcgtcggttggaagggatcccgccgtgggtctgttggtacttgtagatcccgtgactgtgaacgcgacgaggcaccataccgacatcgtcagcaacccgtacgtctctcgaagaccgggcgacgggactcacgtaacatccccacccagcgcatcataaggcatggggaaaacgtcctgagattcttcctcttgcaacctcatgctgccctttctgctggacctccccgtacctggctgaaccctcgagacgcctgacgctcccgcaccgggttcgtcgtcgttcaggaggacggtatcgttaggaacgttcaaccccgaagcgttcctaaattcgggcaagagtgacccgcccgatcgatgatgatcgctcgatttcctactcgtcgtcgacccggccgttccgtgtgggtcggcaccgccggtttgagattgcatgatcgacgtcctcggcgtctcgtgatccaccacgctacccctcctcgcttctcccgcctgacgttcttcggcactgacgaggtgtcgtctcaagatcctcagtttctcttcttcagggatctcttcgatctgagtcggggtgacgacgtgggaggatatcccgctctccccgggagtggtgacgtgggtgtccttcttgttcgtatggttattcaactggttctgaatgctcgtcgccgagatctgacgaggaaaagcggggagctcgaggtctggtcgtttcttgtctcccgtcgtggtcgtcgtcgtgttcgacttgtcatctcgctgttcgtcctcatccgacctggcaggggactttgactttgattcgacacgagtggatttgctcgacctgcccctcgtttccccgtccttgtcgtccttcttatcatgctcccctcctcccaacctggcactcaaggcggagacctgctgttgtgccgtgttcgcagtcgacgctcccggttgtctcttttcacccaacccgaggtctttgctagtcgtcggtttatccttgttcgtgctgttctgcccattattgccagacccagacccaggtccatccgacaagccctttctacgggcaaaagaagaaggtccgaattcccccttgtcatgcacagagctggcaaagctcctcggtttgaaagacgtgccgaacggcgaatcggtgttcctcggagggatgttggggatgggaggggaagcgatcccgatcgcccgggtcgagggggacgcgttggccgaatggatctctggggtggtcttggatttatttatgggctgtgagccggtaggggtgttgcttgaagatgccatggtggacgaggtcgacctgtaggaagagacggattggatgggtgatgttgttcaagtgggtgatgaaacgaaagtctttaatgatggtcggaccctttcaccgcgaaatgctcgacttgccacgtcgacgagatctgttctcttgagtgagcagaggacagaggcgaggtgatgaatgccaggtgacgttgttagtgcaggttgtgattatgatacgtggtggtatatggatgtcatggaatgggattgacccatgtggacaccggaagttgttttggtctaaaccgagcgagccagccggtgagcgcttacaaagttgcaaaagtcaatttattctgcgactatgacgacgagcagcaccccgcacaccagtactctgcctccaagtatcacctcatcatacctccatcgtaaatcgcttcgtccccctcatcatccgtactgctttcactcggcaatgaatacccatcatctccctccccctcgcgcagatcatcatcctcgtcctcgtcctcgtcctcgctcgtcccacctcccacgggcgtacccgaatgagaaaaccccgtaatcggaggcgccgctgtcgtcccgtcgttcgtcccgcccgtgggcatggtaggatcaggggataaccagcgggacagtctcgatcgacctcgaccggaactcgacctcgatcccaaacccgagcccgagcgtagacccaaacccagacccagcgcgtcctcgtcgacgccgacctgatggtccacctggacgtcatgcttgccatcgcgcggtaagacgctcgatcgtccgagtttgaaggtaggtaatttccccaagacggctgggaacgtactgctcctctgtctcggtgagagctcgttcgatggcatcttgcccacgtccggcccgcccgctcggtcgaccccgtctcgttctgctcctcctctccttcctcctcgacggaagacgcgtacgcctcgcccatcatcctcgaactcaacaactctttcaactctctctgcctcgcccgactccacgaagcgctccgtccagacccacgggacccgaactccatgtcgggcgagatcgtcttgaccctcctccgtcgtacggaagacggtgccgcacctgacacgttcccacgtacatcgacggtcgaggcgtgccgcgtcgcatccgcatacgagatcggttcggtcgtctccctaaacctgcccgactgacccgtcgtcggttgtgtcaaagacgcgtgctgctgacccaacgcggtccgtcgtcgaaacttggatcgcatggcgaacccgacctcggcatccgattcgagcgggatgaacggggtcttgttgtgtgaagaggacggttcagagagtccgtccggtgggctcgtcgatcgtggtggtgacgatcggtcagctgcgtccttggccgtcttttgacgagcagccttgtgcaaggcatgtcggacctcggctcgccctttcaacacgctcctctgtaaacggcggcgcgacgttagtatcgcgtttgagaatgatgatccgcgattttaagctcacctcgaccttgagtcgattctcaatcatatgaagctgttcagaattggtggaatgtgagcttgcgggtagtcagcacgacctccacccaacttaccgtaggccatgcgacttgctgtccgactctcatcattcgatccagctcttttcggtcaggatctcgcagtagtcggaaccagtcctaagttgaagcgaattgctcagttttgatatgtaaagagacgagttttgatatgtaaagagacgccacaagtgatgctcaccagtattcgagatttgggcaagatggtcacgcttcccgcgaaacgctgcaaaaagacggaactccagtcgctccccaacagctggggcatgagttcaagatcccttatgacctgcgtacgagtgcgagtaggatgagagacaatagcggatgattgggaaggcaatgcctaccttgaaattcttggtcaactcgagcttgaggtactgctcggcagctgacagaaggaacccgcctcgccatcctatacggcatcgagtgtcagcgaaagaaacgcttgccgcaaattctgttgtttacctttgcctttacgatgagacacaggagaccctaccgatcctcggggcgcgaaaaagaagactatttttgcagattagcgtcaggactggccatatacagctcgctatcagtcgaccagatgacgtacgatgcacatgaggattggctgccaaatgcgtgcgactcgtcagcaatcaaacgtgattcggtaattcgggccaaactccccctaccttgcgatacgatagcatagttgacattgaagagcaaatgcagactttccaggggaatgtcgactcgcagacttccatccttgaacttgcttccaaagttcatcggtcgaagatcaccagttttggtcttttgcatcaggactacacctggtagaatcccagggacggcagccgacgcgactgtaaggacttgaatcaacgtctgattcggggcggagcgtttcgcgtgatagcttactgatggccgaccagatgacacaatcgggcgccgtcaagtgattcaagagtttggtaggcgaatgttggtcgtgcggaatgaccgagacgttcaaggcccgtcccgtacgttcgtacgcctcacgaaaggtcatggatcctcgagtgaaaaaggtcgcctgcgtccatcaggactattagcgagtcttgattctaaaagcacaacaaaagactcacctttttcgcccattcaaccgcactgaaacgggcgccggtcttccagaaacgcatcaaccacacgcttgaatcgttggcagaatcgtcagatacggcttccgacttgacctttgagccatacgaaacactcactggatactatcctcgcatgcagtgatgcggtcagccagctcgggtaccaggatctctctcaactcgtcatcagttctcgtgcacgtcaacgcggccacgagacccccagcactcgtccccgtgaccactttcgggaggaggtcggcttccaagaacgccttgacgactccgaagtggtaatagccgaaccccgcaccgccagagagacacaaagcggatgctccatagtttttgttgatggctcgatagaagcgccgtttgtcctcgagggacaagtcgggactctcgcgaagataatcgagtgatcgtttgacctcgttgatataggctatatcggtaaggtctgttattcgcgagtcgaatctttcaacctgtatgacgggacccacattctatgagattcttggttccgagaaaggtctaagtaaggcgacgcaagtcagactcggacgatgaaagttgtcagacagatgcgactcgcctccgaatacatcctcacgccctcgacaccagcgaaattgttcctcagacaaatctctagcacgcccatcagcccggtaacatctcccacagacctcaggtggaccagactctttcggaccttcctgatcagggggtaatcgtatttgggatcttcatccgtctctttccattcttggaacccaagagcatagtccagttcggtagccgtattcctccattcagcataggtctttgacgccttcaacttgcgcgtgagtttccgtttacgtcgttgaccgatagctagtcgacaaaagcatgcaaaccgcgttcaatcaggtcggatcggctaggagtctgatcggcagactgtgaaactgcttacatgccacggtccactcgatcccattcacgatttgccgtaggaagacgtacagaccgaactcgaggtagatgaaaaggaagataagaccctagatgtgatcatttgtaccaaagggatgtcgattcaggtctttcgaatgagatatcgggggtcgtcacttacaagtaatggccatcggaagaggtgatatgagaaaccgatcttggactgatgagccgtcgtgctgcgtctgtgattcagaagcccatatcgatcgggtaagagccaaaggtcagctgatgatgctcgaggcagagccgtcgggctcgcttgaggactcgccacgcccaccgatcacgtaccggctgatccgttgatggaccggagcgaaatcgctcagacttttgatgctctcgaccttttcccatccgtatatgctggccatgctacccctcctcctgcccggacccggtcgttccaagccgggactcatcgtcccgttcgattctggttgcgatagcggtgtaggatccgggatgaggtcattaagggcgagagcctcttgaaatgcctctatatggtcctcgttcaagaaggtctcccgtagtagctcttgagctttcgagctacgctcttgcgagaacggctcgtccgtgcgtgccataatgtcgaacaaggaagacgcgctgtgttgtaagcgtggtggtgccgtatcaggatcggacaatgtccttctaaccggtccttgacatcaagctatgctagacttcggctacagtagccagttatattaatggcagacgattccgagtaaaagtgactgtttgtgatatttgacagagctgaatggttcaatctcataccctcaatttaggcaacgtcatatcgcccatcgagcaagttgagaaggtggaaataacaagatgaacgccacatgtcaaggtcgtttctactctttttatggttgtgaaaccgggaatgtcatggcaaaagactatattactaactactggactatactagactatactatacgtactcatcatctcggtgacccaccaagaccaacaagaatatcataccaccttcaccggcggggcaagaaggatggcctatcagatcatatctgacacaacagaccgatttgacataggccattgcgcgagtgcgtaacatgtcttttcggttagtcgtccttgtcactgtcgagttccaattcctgttgacgcttgatgtcaatccccttctgatacatgtgccggttgcggatgtagtattcgatgggtttcatctgggccaccagttctcgacatccttggcgggtcccatttggcgttcaagagtggagtagatcttgctggcagtgcgcgggtggatgatgaggtccaggttgttgatcttgtaagtttccaacatgagcacccatttgctagcgtatccaggaagatccccaatagcatgggcttcctcaatctgttccccttggtacaccgcaaaataaaacttctcgtcgaagctgaagtgacgcgggctcttcaaaaggtgggtttggccgtcaggccaaaatcttgagggtatctctaacatactcacaggcgagctatcagctaccaatcgctgaatcttttcaaattcaagcagctcccctttcttggtgcatttcaactcaatcgctctcgcgctcttcacttgacgataagcgccaagttctaaggcccgggcgtccatccttttcttcaagccttgccagtccctcctgacaacgggcgtaggataatgacccaccaagctacggtatcggaagcatgtcatctgatatggtgagggatcccgaaggcggcaacgtacacttgcaggtgccattcgtgccagtgaaggtctttctcatgaggacgatacttgaacttctttgcagatcctacaagggccatgttccagctctgttcagcccgaacagctggtaataatgaaattgccgtgactcgatacgcactctttttggggtcaggaatctgcccctttaaatccgcttctatagtcttggcccatgcggccaccttgtcgggatcgagattactgatttccgaagcagtgagagagaacgcagcgagaccctgcgaagaagactgagggctgatagctaattcagacacgacaggtaggtcgatgtgatacttgatgatgtcgatatgcgttgtttaatgataagcgagcccaacgatactttacctggggggctttatgtactcatacccatacgatcgagtgctcattgtgttctcatgattagctattgtctcggattgcggcccagtcactcgttttcagctgatggggatttgcatttgatgttttgttcgattatacatttttcgctggagttggcgccttcttcgtgttttttgggaaggattcctcttgttcgacgattggcgctgtttggcgagtggtcacctgactaacgagttccgaactttcgaacggatcgccgttctgaggtggatcatcggtcccgccatcttgcccgatgatcgaattcactgcgaccggcgatcctctccgttccgagcgataagcacccgtccagccttcgacctcgtctagcaaaccgtccgcaacctcgatttcgccatttccgatcccagtaccttcgaaatccaagaaggcgttgtgatcggcgctccaccggtaagctcctttgagaacgttctcgatagctcgataggcgtctttcgatgcatacgagatgtgtgtcgcaggatggcgatacgacgctggtcgacccgtgagggaacatatcggtttccttctcgctgcgaggcagattcgaatgaaatgtgaggatgtgcgctgatgtcggagtgggatgagggtcgtctcttactttgtattcgattcctaatgctgacgaccggtatctttgtccaatccacgtgatctccaaagacgacgtccatttccgctttcaaatcatcgatttcctccaagacgaggtagtttcgagcgtacgggccctcctggggagcttcaccgggaacctttgctttcacacccgaaataggcttctctgacgtttggagcgagctttcctcttctcccccttgttcggagactttattgaccttctttggcgacgaggacgaggcgactggaacggcgacaggttcgatgttttcgggcacaccgtcaagaccaaccggtggctgaacagtttcgatcgaggggtgcggcaaaggccgtttcacaactacgatcgtatctccgcctggaaggaccgtctttttgagactagaccgactcgacggcatctcgaccccgtcctcctgcttgactccctcccccgtttgttccgcacgtttaagctcggacacctcgaccccctcaactcggctgatccatcggatccgaggaccctcgaccactttcctcgcttcctttgatttcaggcgcctctcttcctccttcttcagccaatctttcaggctctctctgttttcttcttctcgttcgagcgcgagagcgatcagatccgcctgcgtgagttgtttgttcggatgaggtttccggggtccgcgaagagggtggacagactaggatatcgacggaaatgtcagtcggccaagcggcaaaaggtgatcgtttcatggagactgactcgacgagcttgttcctcttgagccctctcatccacctcgtccctatccttcctcgtcgaagccctcaaggcgctcctcctgagctctccctgcaaggtcttccggccaagtcctcctcggcgtccgctcggcttgaaacccgaatcgagatcctcgtccgcgagagaatagggggacgaaggatctccgtcttcctcgcctgggagaacgatttcgactcggcgtcgtttgctctctcgttcctcctcgacctccatttggtcatcttgttcgtcaacctctgcatctactgtggaagcttccaccgcagtcgactggaccttcctgatcggagcaaccttcttcggtccctttttcaggtaagccaatggatcgtgataattcctcttcttctccttttgggtctgcgtgcgctcttcctttctcaggcgtctttcctgtacgttcggatcaaggtcgtcccccgccgcttcgtcatcggtggatgcgaaatcatcgtcgaacacgtctttctggtccactatcgggaggagcagtgcagtcacgggtatccctcagtcgcaggttctgccacgaagtaatgcacgagtaaatcccgtcgacgcacgattgtcctcgaaatcctgatcatcctcgacctcctcaaacccttcctctgcattgagcgtatgggccttgtccagcaatgcccgtaggctgtattgacatgaatccgaatgatcagctgtcggcacggcttgggggaggacattggttgcgaactcaccggtttcccgcggtactccgcttagcccgacctaggactagcgattgatcggccggcatcttgaatgtcgacagtggtctcaccctaacgtacagctgactggaattcagagccgtgactggatttaggtcgatggccacgatggatatatgtacccttcgtcgtttgtagacctagacgacgatgcgaccatgggtccggaacctttttcaagctgaataatttgcttccgacaaaatgacgaaagctaaccatcatcgacctaacagacagcagtcaaagggcaaagcgtaggtcaactcgatagagcacaacatcgtttcttgtaccatcacaccgttctgaatagctgacatctaggtcgtttgaacctgcaattggtgcctcacaaagatggtgcgcatcatagccgagttccggacagcatgaccggcagaatcgagctgatggacggtaccctgttttgacccgcaggcgacgagcgataaagtactgggcatgatcatgcttggcgtagcagccttcgtgttcacctactatactttctgggcactcctcacggtcagtctcgtcctcatttttagtctctcgtttcatcagcctttactgatacggaagacccacgtaccgggttgacacgatacacagcccttcttaccctcgacgtcccccctcctcagcatctttccgcctagggaatacgccgtcgctctccctgccatcatggtgcttatcggaggatcgggagtggcagccttcatcggacgggtcatgatgaaggaagcgagaaagaggaggatcagggaggggaaagcggcgtgaacgctagtcggggacaaagtggatctgtgattctttctctgatacaggagctttcgccggttgatgcatcattcgagagcagtcgtcggtcaccacagtgaagcacttggtattctcatgcatctatcgcgtgacggagcctctgacaccatagtgaagtaccacctcgagatcggctatgactgccaagcgatcaaagcctgagcagcagccatcttcgacccttcctcaccctctccttcaatcgatccgataccctccaaaccttccacaatctcccgatggacttcctccgagagcgatccatcttccatcatccgcttcctcgtcgtactgagcgtaactagcaagacgcagatgttgctccggatctcggtcgggagaggtttcgaagacggtctaggttcggcatggcccagcaagtcgtccgtctcgacgtgttcttctctgaggggtttaccctgtaatcggcccataatcttacttgtcgtctctttgacgaagacttgcttggccacgacgttgactgggcacagaaaaagaatgagtcggtctcattcagttcggcgctcggttcagctttgattggcagaggacgactcacggcctgtctctgtcctcgtcatcaagaccagccccatcactccctcgcccactaggacagcattatcatgcaagaccagctgcatcaaggcctcgaccacaccgtcgtttgccatcttctcctgcgcctgggtcacctcggcctggtgttgcgtttcatgcgatgatgccagcgtgcgaaggatattcacaaagatcctagccgactcgcacttgatgcccgcgtcgtccgtcttggatcccaacgcgatgattgacctcatcaaccctgtctcgaaagatgctgcgtctgcaagcttgaggcagttgtgtactagggcagtatatgtctgtatgaaattcatgttcccgcaagcacggtggcaggaacacatctgctcacaattgcctcgacagaggtgcttcagggcgaccatcgccccaccgaccagcggacccatgatctggaccccgacctcgtcatcaaagacctgccaatcctcgaaggctcggatcgccagcggtccgagttcgcctttgagcgtgtcgggcaagaccaaattccgtagcaagccgacaatggcgtaccggacctgccggtccgcgattaatgaactctgtaggagctttttgtaggtctcgaagaggtcggtgtcgctcgcaaacgcctgcactgtggcatctatcaaagacggtagtgcgtatgagcaccgcgtatcgattttgagtcattgaacaggtggacttgccgcttcgaacttggttacccatcgccagtaaggcacatccgaccagatcactccgtccagcgcaatcctccgtcaagcccatcttcatccatctctggaatcttgcccagacttccttgttatccgttcgatcggaaagatccgtctcggcacacgcttcgacgacgcatttcatcaagacggctttggcctgtcccataaacttgtccgtgtcgaaacccgcctgggctggctgaactccatcagcattctcctgttctggcacgcaatctttccagtggtccgggactcgtgcgttctctaacatgtccaagaggatgacgatcggtttcccagaggacggcgatgtcgaagccgagtcgaatagcccgggcaaaaggtcactcctcgatcccgtgatcttgtcgatcaatgtgcatgtcgagccgaggatatgtgtctcgacttccagaatctcttccggatcatcttcctcgtcatcgtccggtaaaagcgagattcgagcttgatcgttcgaccgctgagcgaaacccgaaagagaggtgacgagcgggccaaaccattctttgttgaattgttgggtcatggaatctgtaaaagacgtcccggtccccaccgtattagatgagggggtgatgctaacacaacttctcatctactgacctatagccgtgcattcatccagtaccttccaagtccagtccgccagaccacggcgcgctatcctcagctctgtccatgtcgtcgacatcgatcgatccttgcgcaggggaacatggagaaaggttgtaaaatgcaagaggcgtagcaagattccctcttcgacgatcgcttgtttgataggctctgagaagtcatgaggaagatatcagccaaatgatctgtgattaggagtcggggttcgaacgtaccgtagcttccaagagaaatattcatcagactcgcaatgatcgctcgtacacagccgaattccacctcgttgagctcctcttcgctgaccagtttgcccatatactgcttcaagaccggacttagagcctggacgtatcctgcctcgtgtattgtttgcctgttctcatctgtgccggctgtcaatcgccgtgcgactcgacataaggattcggactgaccatcatcgactaccagattggcagccacccgtgcggcttgcaaggtgtagtcgtgacgactttgatggtctacaggactttcaatcgctatccgtagagcctctacgatgagtccgggtatcttgcctgatgcgaggtctttccttgtcgtttctggtaagaacaagaactcgatgagaatcctcctcgcgagcgttggacaagatgacctgaccggaactcaccatcacatcctttcaatgcgtcagccgtatctctcaaagtctgaattacgcccttgtcctccatgttgttggttcgagctggtatcaccccggtcgtgcgagttcatgtcatgaagtgcgaacaagagagcctcgagtttagctgctcgctgctcgcgaacctcgggcttcggcgacggcgacggcgattggcatgatatcgacgtagcttgaattcatcggcgagttcttacatactgtacatctacctaatcggagttacaggtagcagataggaactgctaggctccttaaatatattaacacaggtttatgcggttgctgcaaaccctcggatcgctgtgctggtgtcttcgctgagctagccgcctcgcacgatctgtcggtcctgagcaaacagggtcttcatcctgcgttcgtgatgcacctctagatccctcttctgctcagccagagctctctgcatttccagattagcaaggtgcttgatttcggcaatcgcatcctgctgatgcttgtatctctgatgaattagatgaaaccatcctttcctatctgtagcctgatgtttgagtatgtcgtacaacttgtccgagggtctggtatgaatattgagttctggatgttcgaagctgtaatgttccagctccttgcatagccgagcactaagggaagagagtctcttgctgttcatagcttgtaagatcctatcgccattcagtccagccaggaactcgtgctcatcatgagtcaacacaacgggctcgtcctagacgtgaggtcgaagtcagcgcaaccagcgtgacactagagctatagaaaaagtactcacatccataagcgccttatcaaggacatccacaagctccatgttctcaagatgttgtttgatggcactggacttcttgctgcactggggtcggccccgagtgttggcttcgccatccagaacagcttcgagctcggcccatctaccttcggcgacaagggtctcataatgtcgagcaaccctgcaagatattagacccaagcagttgcctatcgatgttgtcaacaactcacagagcatattgccatttgtaccagataggatccctgggacatccgtacggctgcttcgccctcatagccctcttctcgttgagcctctgaacgcgcctttgcctgatccggtcgatgtgtcgggtcgacaggacggcttgaggcttggagtcgtcatcttccactgataaggtagggccggcgacttagatatgctctactggaatacaatggaggagggacggggagagggtcataatggcggggtgtggcaagttacttgccttggataggttggctagatgtgccggggtaaggcggcgggctcgaggagaacatcttcggcgcttgtatagtttgccagtcacgcacttctgcagtatagcttgtcagcttgacagctacaaactctagcaagcgatgtcatgatacggaacacagtcaacccagttcttatatgcttctcaccaacggtcgattcttcaactgaatcgatccaccttcaattcaaaggtatccgtcgatcagtcggtcccttgagaaccttgttctcggttcggcggtgacgttgtcaggaacaaagtcggcaccgacgatcacaatacagatggatctcattataattgcggggtcgtcgtcaggtctctgaactctgatcacaagataggagctacaaggaaatcgtggagaacaaaacaaagatagcttatcgggtgtccgtgggtcgtgtacatggtcaagaagatggattggggcctttaagcgaacaaagactatttgcaacagccagcggtcagatgacggaaggtgtgacagatggtgtcgttcagatactcaccattcacatggcccatccgatttccacctcgtcttcgtcggcattctcccatctcgccgcggaatcatcgtcctccatgacctcttcctccggcacatcttggtggcgagcgtgattccggaactcgacttgtcgaggactggcatacatcgcgctcgtcttgctcgcgacgacggcaatgctcgcgctgtgcaaatcgtcgatatcgctcatgagcgagtccaagtcggtatcggtcatgctctcgttcgaatcatacgaagacatgccgctcgaattgacggaagtctccgaaatgcgtcgatcctgccagagctttgtcgattctggaaagcccgaacagtaacggtccggtcgtggcgtggtctcgtcctcggtaatggctgctttgtgcacaatgggcatctccgtcttgctacgaaggggctggacccggttgattggcgtggtagaacgatcatcgtaaagctcgaatccgagaccatgcattgcatgaccgtaatgctcgccgtccgggctatcatcgtgcgactccaagctcatcgaagaccagcttcgaatctcttcgtcgagctccgccttgatctgtcgcagaggatcgacgcgatcgcccgcctggtatggcgtcgtgtcttcgagacggacgtcgtcgaatccggcgagtatgctttgaaagaccttttcgtcatcttcgagggtcgacaggctcatgctggacgaggcggtggtcaaactggtcagcgatggcgattgggtggatgtcgacgagaacgacgtgtcatgttccagtctgccatcgctcgagctggaccttggtgccattttgggatgcacgttactgcggatcacgagcggcttgacggcaggtagaggcgggaaagcggattcggcgagacccattaccgaatcgtttccagttggcgggctcgatgagaggtcgaccgcattatcaagttgtctcggcgtggctttgtagatagcggccaactcggtctcatcagctgatctcggtcgcggctcgaacgtttcagtgcccccaaccggcgtcgcaggaatgaccctgaacattggcaagtcgtccgtactggcggcctctgctccgtccgtcccaaaagtgatgctcatcagactagcgatgctgccggagctcttcatcctgcggcgtgtaggctggcgtcttagatccgtggacgctcgagccaacacttctcgatcgacaggtgcagctcgaccgtcgcgaagtagtgacgacctacggacgggacgctctgccacgcaatcttcaaacgcgtcgctcgaggcatccggtcggttcggcgagacgggcaaggtaggcgagtcgagtacgatcgacctagctcgcgagagttgtgagcccgatgaccctaaactggtccgcctcgagctggatcgttgtttcggtcgcaacggacttgcgggatagtcgaggggagagttgaggctgatgacccgaggcatctccaggacagggggggtgtagggctgctcgaccttggtcggcgaagccatccgagcttgcggcgtggagagcgcctccgatctgagcgcgcaaggcagggtcagaaacgtaaatctacaaggcatcgtgttgtcagagtccactcacttgaccgtttctgctggtgacaaggtaatcgagggtgacctcaacgatcgcttcgactggctcttcctcgtggatgatctggccaccggcttgggggcgctgacaccggtctcccattcctgcttcatgaccggagttgttgggttcgagccagaccccaagaacctatcgggcaacactgggctaggtgcgggctcttcgtcctcgatgagcgaggccaggctggtcccttgaatggtatccgaggagggcaaaccgaaatccagcccgagattgaagctcgatccggggagggcgatcgaaatacggggattcaagcgtgttcgtgtcggggttggctgctctacttcctgcctgtcctcgtcatcttccttttcgtcctcgctggtttcgtcagacggctgtcgtcgatgagaggaaaagtaggtgggcgactcgcaatacgtctcgacgccaccctcgctgtgcaccgagaaggagctgtctgagcgctggacgacgctcgtctttcgattactcgaccgaggagaggccatcggtgccaccccgccgtacgcatcggtggtccctaaggagccgagagccgaagtggtccgtctcctgctatgctttgccggatcatacgtttcgggctctaccgagtggacctgtcgagtctcgagcgggacgtgagagaatgacgcccgacccggtccagggtagatgtccgccgagttggacctgacaggttctgtcctgcggacgaacatcgacctcgccctctgctcgtcctgtatttccgctacgttcgagctcgcgtccacgtccgcgttgacctggattgccgggtcagtgaccgaaggtttcctcttccaacctccgaagaaccctttaatcttgccggcgcctccgcctccgtttccactcccactcccacttcggctcagatacttgtcctttttcccaccatgagcgtttgctggcggcgtatgaatgcgcgagacgggttcttcggcgaacatgaccgatctcgccatcctccttccttcccccttgccccaaccaggttgagtcgcaccggtatgagctagcgggatggatcccgagctggagaccgaacgccctgtgacgaacttttctcgactttgccgaggctgcgcttgatgttgctgatgctgttgattggtgtcctggtaataaggggatctgggactctgaccccaaggggacgccatcccggacgaagcgaccgagaatgacggagaaggcgcaggggaagagacggacctccacccggaaagcgaggtcgagctcgtcggtgtgacgaggacaggcgaaccgagcccgatcgaagccgatgtcgaagtggaagacgaggacggggtatagatcgtccctggagtccggggatcaaaggctacttccgtcgaataagattccctagagcccgatcccgacgacgacggcattcctcgccctgaaccccctctcaaacctcccacatccgtatctcttgtctggctatacgcatgttcatacgtctgatcgtatcgtgcgaaatcccgatgaggccgtgcttgttccggacgtggagacaggtcgagcggggcaggcggtagttttcggttcggggccgtacccggatgtcggacgtttgatttcgagcccaaattcgcgttcttaggggtcgataacggggtcatcctcgaaatcatgtgataatcctggtaatcctgatgttgccacgcatgtggctgctgctgcccatgaccatagtagttctcctgctgacgaccgttgacctctgcaccgaatcctaacccgaatcgaggatcgatgggttgagagatcgatcgaaacctcggtgacactgacgccgatgaagacgaggaggacgtggagaacgtcttttgggtttgttgatcctgcgatcgagtattcaacatcatgctacccgtctatccgtgtttcctggtcgatcttggtcttggtcggtgatccgcagtttgtcgtaatgccagagggtcgcaggaggtgaagggtatcgtcactgtgggcgtctggcgcctgaaggggatgccgttctatgccgttcgatgtggtcaaagaatcgactcgattcgacgtcaaagcgcagaaaggcgaaaattggtgtttattacgtaggtcgaattcgagagcctgattctggcgttggggttgtagatatggcaggaggaaaacgagtgtgcttgctgtggaacggtagtcgattcgaggtgattcggtaaataaactgagataggatatagtaggtgaaacgagcgtttgtcgagcctgtcgcaaggtgatggtcgttgcgaggtggagcgcgaaggttgtcgacgagaccgctcagcagttttcgaaattattcggatggtcgatgccggggtcggctagtcagatgagagagagagtgacgaggtgaaacgatgaccgagatgaaactatgatcgagatgggtggcctgggatggagagtcggtggagggtgtgtgtgaataaatgaagaaggtgtcgaattaaagacaaggcgatccttgattcctagatactggacgcgacgacgcgaagccgaagacttgtggattccatcaaacaaccagcaaagacgagcaaggggcaagagcgtgaggaggaggggacgaggtgaatggtgacgtaaggacgcgactcatctttcctcgtacacgcgactttgatctgggacctgggattcccgcagccgcatcaaggctcaggccacagcaagggaaccgtcgattgcttccgttccaagccacggatcaaaacgccatcccgaagagcggcaagagcgagccaagggttcctttgaatcaaacgtcgatgatggtttacatcagaagctcaactcaaaatcagcgcaagcatcagtaagttataagtgacctcagtaagcgctgcaaatggggcaaatcgttcatgcagtccgttcacatcgttccttttccaattggccatccgtccgtcggatcagcccctccgcttccgtcacctgtgctagcataccgcaagccgaaccctaagctgcagctctgccttcacacgcatgcacgaagacaaaccgatgtagagcccttctacccggcgcaatcgctgattgatgatggccgtatccacgccagaatcatctccacggcgggacaccagaagagatccaaaaataccggcccacctctaactcagaaggattatgacattatcgacaatgctctttgtcgggtccacacgattttctccagcggagtgaccagaaacgatcgatttggcaacctacgttgctcataggtctgatgttaggtctgatgcgtgaatggagagtcctcgttacaagctgcctatcgataaaggcgtgcaacctcgggaatgcaaagaaagctttgtcgtctcatggaagagcgtcatacattcaaggccagaatgtcttgtgtaaggaaccttgaccaccagcgagattatgactggcggcttgtccagcatacctaccaccctccccgatcgcccttcctcgttacactccgaacagacgtgaatcgcatgactgtgttgactgattgtgctgctcgttatcacgtctaccgcggcggagctacgccaaatttcccttgtttggcacgttcggacgacattcagagcattcagtatgtgtatgagtaacgcagtcgaccggcgagcagcgaagccacagagaactgtctctggcataccgcaatggtctacttctggtcgagcttgaaccgccaggccaagactacatcccatagatgagataacaagatataactaggtcggctctggagtcccagacacatcccggattcgtcgatcatcgatcgtacctaagtgacgtcgctcaagcccaatccattgctcaagacgtctttttcttgaaaaacgtcgtcagcttgggcatcttgctagtattgacctttttcagagactgtgatggatatcgaaataccatgtacgatcagcatgcctgttcgtctgcttgaatcgaggctttagattgcacaatcacctcttgagctctgcttcccttctcgctcgctttcctctttaagccggccgcttccttcttcttgtcacggcctatcaggtccccctcgtcccagaacgattcctgtccagactgttggatcggccgagatgcagcgtagacgagcgattcctgcgtatccaggtagcgatctaacagctcgaaactgactcgctggtacgtcagtgctggtcgcctccgacaacggcgttggcctcgtcactcactcgtaagattcgagcaacgccgctttggtgccaggctcgatatactgtcccaaaatgtctccagcgagcctcacgcgtgccagttcgaggacccgctcatcctcttccgctcggaccttgaccttgacctcgatctcgactccttgttcttccgtatgctggtccatcaagctttcgagaagggggccgagaccgagactgacgaggcctcgcctcagactaggctgctgttcaaaagtgtcaacgctggctatgttggagagtcgggatctaagccaggtgatgattccatcgaggctcgggcggtagtacattgttgaagagatcgctgcaaccagggagcgtctcagctcgagagcacgcatatcggccggatagtacaccttgagagacataccctggctctcacacaggcttaataatgcctgtctcacaatcggtacgttcaggaatctgccgacatcttcgttctcctcccacgctcgtcctccggcagcgtcgtcggtctcgttcgacaatccacctggccggagccgctccatttcacggtccatctcgtccatatcctctagatcttcctcgacttccctccgccgacgatccggtagtttcgagctccgtgtctcagcaaaaggcatgacgagacgattccgaggtaatcgcgcgagagcctcgacgaggtcgtccaccggtaaaaacttgtccgaccgttcacccgttcgttggcgttccagcgcctggggaagggtgatatgggattgagatgaagacgaagaggtgcggccggtagcataggagatcaagagggggatcaagaggtatttcgggttgataggtgtcatcaagagcagagagccgtctgagaaggcgcggggagatgagagaatgcatcatgcaagactaggctgagagtagctcaccgctgatgacttgctcgccatagaaccaactacgttctcgttccggactgacggactgaacttccagtatagcctcggtctccccggcccgagtcacgaagtagaggcccggatttccattacgggggtggggtagacgaaggtagcggtggtactggtcaggttcccgcgaaggtccaggtgtcggtactgttactttggccgagaatacagtggatggatcggtcaattctttagtgagacgagtatcagcttttgatcatgaccatggaattggtactgctggatgcataccctttggcactattgcgaaatacgacgtgtcgatcggcggtggggttaacgaggtcgtcatgatgaggtccgagtgacactcaattcgatcaagaacttagatgaaggtgtctgacatgttagctggcactttatcacgagaccttgatggctcacaagatgtatacgaggaggtcgagctgtgacgaagaagattcgattgattctctggaccgagactgaacaaacgcgtcaaacgcgtcccacacgcgacgcgttcattcgatgatttagatgacaaggcgcaaggtggacaggcatcatagaagaaaatgcttgtgtcagcaagatttcctcctctctctttgaacaaaaatgagttttgaatcagacgaatcgctaaatgcagcattcctgggcacttcggccgtaaaattaagctgagtggtaatactaccaatggtgcagcccgcgctctaaatggaccgaatcgatctcggccaagcggtcgggcttacccttactctgagtagtcatctgagcgatcatggtgcagggtgggacttttgtgtcatggtatactgatattatggtctaaaggttacgcatgctatagcaagaagaggtatagctacatccattgtccttgacaccacctgtgtttactcctgcctggacctggtaacagcaacagcgccttgctcgaatcctcctcgaacgtctagtctacttaaccggcgagaatttgctcttcgcccgaagtgaggggccgtacttgatcaagacaattgggatgggaaccatgatcaaagccacacaacctattcgacgcgctctagtcagtcaaagcatcgagatcggagtcaaagcttgctttcactcacctagcaaggtactcgcccatctagggttcatggcttcgtacatctgacgagcgaagagagggaagacggcaccgaagatggatcgacacacggctgtggaagtcagacaagatggcgagtcagttccgcagcaagggtgtacacgactttgtcaaacatcctcactgttggcagcgagcgccgaagccgcagcgaagagatacgtgtcaacaacctgaggagcatgtcgagtattagtgaggccacaagaggaaactcgtagaagcgggacttgcgtagttgaacagcgacacgaagattcccaaaacggcgaagccgagcagtccaccggcacacatcggcgacgcccagtgtacattcgggtaactcgtccatccgaactattacgaacaagagtgttagtcgaggttgtttccccaaaaggctggagtccgcgactgacccagaagaacgagatggcgaacaagggcgcgacgagtagtgtcatctccaatctagcctcggggggtacgttgtccggtgcgtgcttgaggacttttcgtctgtaccgtcggtcgaatgtcgtaatgtaggtgacggtcgacaacaagccgccgacgaaaagtccgagaaacataagaccaccggcaccagcgttgaacccgtgtccctgttggaagacgatggggtaggcgacgaagaggagatagagacagccatagacgaaagacatgtagatggtgatggcggccagcatgggttcgaggaacaagatggtgaagggtttcatcacgatatcctggaacatcgcgctcgcggttttttgcctccgctcgagtggagcccaatagcggtcgtccccggtctcctttcgcaggatctgggccttctttaccaacagaattggggtgtaggtttcggggaccgtgaagagtactgcgcgatcgaagagcatcgagagatcagtgacggttcggcaaagagaatcggcgtggtcatggacgcaccgaggaggccgcagaaagcagcaaagaagcatagaacccaataaagccacctccagctagtacctgagaccgagatataaccagcaatgaagggagctgtggccggacccgcaaaaggcgccaaaccgaacctgtatgatagaatcgtcagccggatgcgttctgtctgaaaccaaatgacttgataaaaactcacattgccatagcgataccacgtctatcggcatcccaaatatccgccaacagcgctccagcattcgtcaatggacaactcgcaaaggtaccagagaggaaacggaatatgaggatggacgcgacgttcttgctaagggcgcatccgacttggaaaccgatatatcccaaaaaggcaacgaggaaaacaggtcgtcgaccgaaagactcgctacacggtccccaaataagagggcccaaacactaataagcgtaaagcgagatcagcggcgtggacatgacaagttgccagatcaagaatacgacccgacttacgtatctatgtccatcaaagcgacaaaatcgaacgcccccagatatcaatatctaggtcctctctcagtccagttccgaatattgactcacccggcaacaaatagagagacggtcaaggtggcaacttcttgaccgaacccaaagtattcaatcatatcaccgacgattccgctcggggccgaactcgcaaacgtcgagttgaggaccaacaagctacccgcaccggtgatataccaacggtaggcgaccgaccagtttttaggattggccgcttcgccagggtcgaaacggaccatgtagatctcgtcctcggtttcctctcgctttccatcttcagcagcagccgcagcagaactggccttctctgggtcctcgtcgggaccaccggaaacgccgtgagaggtctcagcggagggatcggtgaaagcatgggcgggtcgtttctcggccaaggtcgcgtcgctctcgaccctagttcgcaccgacgttgagctcctagattcctcttcttccatcatctcgcccgctggatgtactcggccaggctcggcgatccggtgtggttgcgcctgttgataacttttgtgcgtggacacccgactcaaggttctcccaaccatctcctggtcggactctcccattccgaatccggcgacggcgatgttcgctgcggcgcctacgagactcatccctctactacgctgcctctccgggcgtgcggatccagaggcttgagcgttcggatgatgcgtccgacgagccaacgcttcttcctctgatcgagcaggaggataaccttgatcatcttctggtggggacgccgagccgaacaatccagctacagcaggctgagatcccgtccgtcgaagaggctgggaggtatcgaacgtggccgggatgtatgctggtgtcacgttgggaatcgcagcattctggttgatggcggtgttgacaccttcaagagtcgccgagctgttcgaagcagttcgagcggcgcggatccgcttgaaagggttgatcttgtcaaacgattggagttctcctacagacccatgctgtcgttcagactcgtgaatcgaggatgctcgggacatgatgatcgcttaggtcctgtttctgcccgttgcttgccaaggcaatattcgctgatggagcgctcggtaggaaattagttaccggtcgatcgatgatgatgatgtgagattataggtagattggtagtatctatcttgacaatgcctacagtcgagtgagtagatattgacactgtgcactgcttcgaggtcaacgtgacgaaaaaagattcgatggacctgcatccttttgacgtgaatgtggattaaggatggcgaggttgactgatgagaaagacaaacggcagaactcacgaaaacggtggatcccgagctaattccagcagcagatccactcggccggatcatcgcaccagcatcgagaaatgccgtacccatctcgcgcgtggacaggagaggtcggcatcgcgcttgtgttgctcggcaactcaccctcggctaacggtaagaaagatagtttggcgccggtctgagcacggccttctttcatttggtcggtcagacgcgactcgcggagatgaccgagaatcagccacgccccgctcggttatcagcagcggcatgtgggcggcatcgaggtcggcatcaccagattatcaattggatgaaacctcctttgcgaatttgcacgtgtcatagacttggcttcggttaggcgctcatgtctggtttcacagcagtcgcaaggtccaggatagatgacggagtaatatgatcggttgtcccattttcatcatgttgaattggtgaccgatgcaccgagtggttaggcactgaatctgtcaagggtgcaaccgctggggtatgcgaggaaatgttctccaaggttcaattctgtacggcccggccggccttccggatcagggcggacactgacgtccatcatcattcgcgtctggctggcatgaaatctcgatcaaccagtagcgagtcgttctacgggtcctatcaacgaaactacaggactgatacgtcacgctgctcgcgcaacgaccctcgcttgtcgagggcagggagaatctaccacaggaggagatttagcgatggtcaacgcagtgaaccctgtccgaattggaggccacttctttcttggtctttgggcgcagggatgaacaacgcccttttgaggctctactaggacgtgagctcaacttatgcgggacacagccagggctgcatggctcttcatcctgatggcttgtgagaggtttcgggtccagctgtaaatccacaagttgcaacaatcgataccatcagatgatccagtaccgacaatccttcacaatcgatgaccctcggacggggatgagtaagagaaaggttcgactcagtctatgggggtgtcttgatgttgaacaaattcacgttatgttttgtcttcgttcagtcctgtctgttcggccgtcgttcagacatagaaatcgctacgtgagtgcctgattgaaggactgggttcggtcgatgtgcttcatcgcctcaagaagaaggagcgcaacacgtctttcatgatggaaaacccatgatctgatggggcgagaatactgccaacatgtcagccaaacactgcacgtcagcgggccccctgccggaaaaaacgatccgacctgacttcggtctcgcataatattgaaatacgggctgtcactctcactgtaaggtattagcggatgttcgcgttgtatccctttattgctcatacactgcatttctttgcataaaggagagcatgccgcgcaattgtaatatcaaacatatgcactgactggccgctcttcaacgcgaacctggatattccgcatgatgagattaagtatggacaccgcaataacgcctgaccctcattctttctcggtcatctcatcgccagcttcgtcgccgtccgagtcatccgcaccgtcacccgctttcaaggctctggcattatcttcgagatcggcttcttccccgtctgtctcttcttcctcgtcctctacctcttcccgctgatcagcatgctcatcttgatcctggccattctgagctgcttggacaagctcctcgcccgactctggagaaaccttgcctttgcccttattacccttccctgcattcttgccattcgtcttgctttccccaccgacggtgggcaaattatcaatcaggccctgtcgtcccgctgccctctttttcttcttgtacacctcgtcaaagtaggcgtcgatcattctcgaaaggctgcgccttgccaggtcttcatgcaggatgtcgtaatagttcgggttccgcctcatgcggatccacaggtacgaccatgccacgagatccatcaggtcttgcttcttgggctcctctcccgacatctcgctcaatgttgcctggatctgctgatctgccgcatgtgaaagcaccgacgagagacgagactcgagcggaagaccctcatccaaaaacctctgatacgtgtctttctgttcagattggcacatcagcgtgaaccgatttcctccttccgacgtggaggtgtcgaccagcgatcccgagaccgagggccagcttgcaaagccttgcatcctaatcagctcgttcaaggtgtagttgcgcagtctccgctctggcggttgaccggaaatcagcgaggtctcgagctcgagatattgagcgcccatgacgatgacattcccggcatgcactgggagggtccagcatgattcccttggaacgatcaagacccgaacgatctcggcagcgaagagggacagggtgatggtcaagtcctgatagtgcatcccttcgtgatagataccgataccgtgcaacaacggttcaatcagagtcgagtcccgcatccgcttgacatttggctccagatcctggcgaggtgcagcaagaaagccgttaatgtctagcatcatgccggattgcgtaaccaagtcattcgcgactgtcttgcagaccatcctcgagggcacaaagataacggtcgatcgaggcaagccggccttgacggcggcatagacaggtttgaccatactcttcaacagaattgccgagtgcggtattgaatatggctggatgtgattgatgagcgggatcgctcgatcagtaggtcggaaagtgtagatacccgtcgacgagattttcaaccagtccgctagactatgcgcgtcttgcagcgaagacgaaagcccaaccaatcttgtcgtactatagctgatcgaaagcaaaatcctcaagatgaccatctcgtacgcttcgtccagcaaatgcaagtcgtccatgacgacgaggtccaagtcttctaggaagttaggatcgcctccaatgtggacaagcaagtccattggtgtagctacaccgatacacggcgcattgtgcttgtgaagctcgaaattggataccgaatcgagccgcagaatctgcaagtgcgtgccagagagcgccaattccttgagacgagacatcatgtcggcagcaaaatgacgattgggcgacaggtaaatgacccgcgaatttcgcttcttccgcagcgttcgcctgcgaaatcgatcgacttatcagcaccaccttggcatacaccctgtacgctctactcaccacgtagcaacatcactgatggatgactttccacttccattcggggccgctagtaaaatactctcatccgtgttgaacagtggccagaagacctgcgactgaatgttgttgtagcttgaaaatcgatcggcataaccggtgccaaagtcgagtggtttcaggaccttttgcaaactgaggtaaggcacgctcaacaaaggtgtaggagattcaggttcggctggcatggcgagttcagccagggaaacctcgacctcttcttcgctccccacccaacggtccgaaatcactcgaatcacgtaggcagacggatttgtcgtcctgattggtacaacgaactccatgttaaccaaggtagtgctcggcttgaaaagtacattctggtactggaagatcgccgacgtcgagctgtcttcaatccaaacccagaatggctcgctgaatccatgcagagcttggctccactggaagtttctgctgaggtgcaagctgatctgtagcaggtcgtgactaagtggccgcagatcgtacgagactccaattgtcgggaactgcttggcgaccgcgacaatagctgcgccgtgtttgtcgttcatcttgatcaattctcccgcttgctccggcgtcatctggcagagctcagctggagcgtagtcatcagcgtgggtttccagattgtgcaggaccatgtattgtagcttgctctgttgcaaggggttttggtatgaccacatccgcttctcaattgatttgctcattgaagcgagcaccgaagcagcgttcccccacttgcgactaagagcgatctcgagcaaggcccggatgatacggccggcgttctgtagacgaaggctccgttcatgtacgaatgacatgtctcgcgatggaccaagcttacctgcgcgacataggcagtgtccgagaccaatgcgaaatcttcgatgtgtgctttgcaaatatatgcttgaagactattcgggaacccaccataagatatcgagcgtcgaagcaatgagtgattaggaagacttacaggatattgacttttccttgtgtggtatcggtaccgccctggagcagtggacatcagcattggtgcagtcttttccgatgtcagtaacaaccacgtactttaacctgacaaggtatgacatccttcatgagagcttggagttcgggaacttcgttctctctgacttgtagttggtggaactgtgcggacgaaatgatttccccttcagattagcggacgtcatcccagtcgtgtcgtaatataacgtaggtgcctgacctctgtactcatgctcaacagtgctagagtatcggcttccgtcatcctagccttgaagtgctggtctgtcaaggcatgtcgaggttaagtttcgttggaaagaatcgcctcatgcttcaatttgctcactgaatatttcaacagtctcgtgcttgagataatacttggcggcgatgcgacctagatcggtgattgtcaggctgttctcaatttcgtcgaagcgaatcatgccaatctccgcaaggcgtcggccagccgtgcgcgtcaagccttcccgtttgcttccaagttgagggtcctctaccgcttcatcatgagccatacctgagatagcaatgacttaggtcagcgagcccgctttgccagatgattgcttcgtatgactaaccataaaggaatggattccgcttcattctcactgaaagacaaatcaatcttcagagaagaagccgagaacgacagcatacagaggatactgaccgaagagataagtatagccaagccattcgatcgactcggaaacgttggagatggttcccaaagacacttccgcgttcattgcatcaaccatcccaggcacaagtctgaatcaagcaaacagatcagccaaagcctttatgcataagggaagggagcctgactatacctggactcgattggatgttgtgacaagacggcgtcaaggtaatgatccagtttgtcttgtgttgtgcagatatacccaacaccactcgtttcgtaacctggacgacctgcacgaccaaagatctggacaagaaagaatgagcaatatgtataacaaaaaagacggagggcgatagactaacttgcaacacgtccaagatcgatagatcgacgaaactaccctttcctgcgtcgtaaacctgagttcccttgatgactactgcatgggcgggcaagttcactccccatgccaaggtggatgtacagcacagaacctaatgaaagagaaatatcttaagcttgatgtcgtgtttgtaaaatggcggcgggcttaccttgatgcaattcgcttcaaacatcctttccatcatgtttcggtcactccgcagcataccagcatgatggattccgaatccgtagtcgaacaactgtttcatctccttgttacgggatgtgccgacttcgcgccggaagaaatcaaattgaggatgtgagcgaggatcaaagtcttcgggattcccttccatctgtgccatttctttgaggcgttctgcggccttgaccgtttctttccttgcatgtacgaagaccatgacctgatgaccctgagcgagattctcggcgacctgtgcggtatcgagaagcaagcgtgagcgttgaacttccttcccatcctagccatatcagcggaccttgtcaaatacggcctgatccatattccgcttcgaggtctcgcttcggaccttgcctcgtactccgataaagtgttgctccagaggcaccggacggaaagacgcgtcgaagaagaacagtccctggtgccgattgaccctataaaatgggaatgtcgagagtcaggccgtgttcgtgcggctaggaccgagcgacgattagaattacctcaggaaatcgctgacatcaatgtaattgggcaacgtggccgacagtcccacgatacgaatcaaagattgactcgactcgacctgtcagccgcaaatcaaggagactttcagttccgaagacgattgcgatcctcgactcgccgagcgcccactcaccagtcgaagggttctggcgacaatggtctcgatgaccgctcctcgatcctcattcaacaaatgcacttcatcgatgatgagcaatttcactttctgatcgtgtcgcggtcgctatcagtcccagactacgctagcaagtggccaagctgagactcactgaagcgagctctccctctcccgtaggctttcgggtaacgacgtcccacttttcaggtgtggtcacgatgatctgcgtctcgctgatttcctttctcgtcaactgcatatcaccggtcaactccctcacttggattcccagccaagccagacgtttcccgatctttctcgtaatctccgctgcgagcgccttcatcggggcgacgtagatgatcttgaaatcgtccttcaatatcgaattagtgccataaggtagcttctcgggttgacggacgttctggctgaggacacgtaggatagacatgacggccacgtcggtctttcccgctcccgtcggcgcacagatcaacatgttctcgttcgttttcatcgcgacgggttgaacgatgctctggatcctgttcaaagtttgatacccggggaaacaacccgccgccatgggtccgagttcgttgatgtttatgagcctttccgaggtttttggcggaacggggtttgcaggcgggatgaccacttcttcggcgtgctgagagacggaaagcagcgagtaagcgtaaagatttgccactgtcgaggacgggcatgctcacctctttttcctttcgtatggttcccataggtaatgccaacctacctccatagctcgtgacggccgtgctcgacgtggatgtatacacatgcggatactgaatcgcctcgggaatcgcagccgccgtattgctgattaacggccgactagcattctgctccagctgagcttcgatgaacgacagaccctcgtcgtgcgtcctcggggccgtacgactcgcactaggagcagcggggtccagtggggcgcgggaattggggacgaacacgcccgcctcaggtctcagcgtgttccctcgatcgtgacgtaggacagcctctcgcatccccggggcgaacagctcggtcacgaggtcaaagctcgccggttcccagcctagaatacccatcacatcgtcctgcagttgttccgcagtgctgctcgagctaaggtagtcgagtaatgatctaaaggatgattcacttgcaatatggctggcaagagcgggttcggacggtcagccatcgtcgttcgacgagtcgatgcgtgcacgtcgactaacttttgtagtctcgcagtgagttctgcagcttcggcatcgggacccgacatgacctgatcttcggcatagtcaccacgtcctcccgcgcccgagccaggtcgaaacgcgatcgcatggtttgcaggatcgtcgagtctcgctccgagagcaggcgggttatagtgatcaagcagggtcggtagaggtatacccacaggaatcttgatctgtggatcttcttgatcgaccgtgacggggatgcctgtggcttgccattcctgcaagacgtctgtccaaatggtttccgatgtaggacgcttctgtcgtagcagcgcttgtaggtgatctactagctgcccggaggctctgcttgttgacattttggcttcaatcgaaacggcagtcgagcttcctatggagtatcagagatcaaacctatcccgagatcgttacttgtttgaaatatacacggttatcgagctgaattgaagcgtgcttttttgcacgatggtatgacgttttcaacattcttgagaagaggtcaatcggtgagatcgcgggtgacttgtttacggagttcaagaaggaaaacaaacaaaatgaatattcgattttgcaagtgtggacttatacagtgccaccatggtcgtttgacagacaacctcgaacaagggtcgtcaataacggctaatatgatggtgatcatgtgctatctgatcaagttacacacatgaacgaaaggaaatatctagctcgagcgctctctccaatagaccgaaccagactcacgaatcagagctacgcttgcgctcctgtctgcagtacgaacaaatacaatgacctctcggacagttccgctacacttggcgacatttgcgatcgttacgccgaacaacagtccgctctacgtgcatagctacacgggtgtacaggacgagctgcggtatcatcacattgctcattcggcactggacattgtcgaggagcgaggtgagccagcaacgaggtgtcaatggcgtcaagagtcaccatggtcgctgagttgaacctcttgctgtattcggtagaatcgaatgctgctcgcagagaagacaatttcttaggactgcttttcagcatggatgatctcgctgtgtgagtagggatacaccctgtgactacatggaacgaatgatctgatccgtcctccgctcctgttcatcctagctatggataccggacggcatctcgtttgagaatcattgtcagccttggtttgatcgacggtatcattaaggatagcgacgtcgtgaccgtgagctgcacctcgaatagtctaatgctggccatctcttgacgattcctctttctccttcgtgaacgcctcagatctgtcgaaccatccatcaactctacaataccgcttcttccaacccgttcctcctactcaattcgaatcccaccgcagaaaccgtctcccccataccatcagcggtagaggtcaccacgtcgttatccacccttcctcgaccggaagatctcaggttgagcgtcaagatgaagtatggcgctgaacgactcggacggttgttgaacggaggacgttcatgaggcagtgatccacaagtgatcaaatcgaggatggatacggtattgacgatgagatgacgacctcactcggacgaggtgatcgaacgatcccttttagacgcgttgtattgacgagattgcactttgtctacatgacgagaataaaaccgataccccgaagacacgtacggctcggacctgaaatttgagcgcccagtcggtcttaccatttcctcttgtcatttttccggacaacggggctcgggctcggtgcagctccgtactcctctccgcaaggagggcggtcggacagcctactcgccaagttcgagctccacgggacgcgtgatcaagcgatcccgtctcgagtcctacaacatgcctcgtgcgtgcatcttcacgacctacccgtcgcgtgtctctcgcctttgttcggagagcaatctcgatgaccatcccgtctacgactgcggagcggtttcgagttgtcctctgaatgaaggtgtacgctagacggggacggggatgaaaggggatagacgccgagctcgccctattattgacgtgtacttttgagaatggtagagcatacgacagatacggggcggacatctcgccatcatccatgtaacaggtcgataatatttcatgaagtgtatgagccctgatagacaggagaggaatctccggcaagccgcataccgcaacagccgaaatatgttcggtgcatgacccaaaaccggacagagattgccgatcggcttgtgtcgtcaccagtgcgcgcaatggcggagggacttcaaaagcgcttcgatcttaatgaatgctgtccgacttggagatgcatcatccattggttgccgctcaatcgatccagcccgcttatttcccttccaagtcaagatggacgaattgggtgggtattcgggttgacgactctttgatgaacagccttcggttccgaagcaagacgcgtcggtcttgtccgatgatcgaccgaggactcttccgaagcggttcggttgcgtcctcttggcatgtctaggtcgtggttgacttgcgatcggagtatagctaggtgggctcgagtcaaggggatgtcggatccgacccggtgatatgatccttttgaaggcctgataaagatatatatatgagctgagggagtcagtctcggcgtgctttagacccgtcagctggcctaatcaataaccacaacctacccggaacccaatcatgactgagcaaccccatccagacaagaccctcgagctgttcggccaacaagcgtctgcaggggtcatcactccattcgtcttttgctacagaagacccgacgcacaggaccctgcactcttgatagacaagcttgaacgaggccttgtaacgctagctcgagcgttcccatggaccgccggccgggtcgtcaaggtcggatccgacgacggactcggtccaggagttttcaagatccggcatactagcgaacctcgacgggtcatcacaaacgatctgagaagtagctctctgctcgatatggagcaatttatcgagagcggatgcccttgttcatcgttgccggagagcatcttttcaccatacgacgtcttgccgggcaagcctgaccaggtagatgctaggtcggcggtgatgaacctccaggccaacatcgtccgtggagggcttattctgaccttggtcggccatcaccaagtcctcgatggtacgggtcaggaccaagtggcgtactggctgaacaaggcttgtcgagcagaggctttcacagaagaggaactcgagatcggtaatatggatcgggagcacatcatctcgccgtttcccgatagctggcaaacgcctcgagactctcgatatctcaagcagcactccacggatgacgagccatctgctacacaaacgcgggacaccgacaccgcctcgaacgagacgccgtcggctggatggaccgacatcatctttcccagctcgtccctcctggaactgaaggtcgaagccaatcgccaactcgagtcgggcttcgtctcgacagacgatgcattgacgagcctgatctggcaagcgctagctcgagctcggtcggatcgtctcgccggggacgctgttagcacgatgggtcgagcgatcaaccctagacgttacctcggaatccccgccacctaccctggatacatctcgaacatggccttctcgactcgatcgctcgactggttgagcactgcctccttgggtacgatcgctcgagaactgcgaaaagccgtcgatcccatcacctgcgatctgagcgagtcgaccagagaactcgccaccctcatccaccgggccgaggacaaggactcggtctcgctcacgtcagctctgaatatgaaaacagatgtcatgatgagctcgtgggcgggaatgcgatgtggtcggttcgagttcgatctgggtctaggcccaccaatcgcagtccggcggacactcatgccaccggttccggggttgatgttcctcctcccacgaggactggacggggaggtcgtgctccatatatgcgcgagatcggacgagctcgagaggatgaaggcggacccggcattcaacaagtatgcgcgcatgtgaggtattacggatcgaaaacagacgatcgatcgattgatccacgaccaggttctatccaaagcattgtcatacccgccttctagatagatcgtgactctcgtcgagatcgagtgccgcgtcgagtcgggttcgtcgtctctcttttgttgatctccaccatcaaatcacgtgctggtatcatcatgtcgaaaaccggtctcgcagtccccgtgccgttctaatcctcgtcccttcgacgtaagaacggacgaacgaacgaccaccgatccgaaaggaccgaaacctgtttaccgatattctgctccccgtcctgaccagaaatccaatggcatcgccgtgtatcacctcgtcaagcgttggcattcgaactcagcctgacaagacgtctgaagactcggtaacgctctttcaccatgtgacaagcaatgtatgggcgagctgtggcagggtagcgaggaagggaccgggaaatcagtccgatgggaggatgtccgtgaagtgagatcgatgttcgaaaacgtcctggacacgatgtcgcgtcagatggctggtcccgactagacaagtccgaacgggatccggccctgaaatcgagcgtttcatctcgccgacggggtaaaccccccacttccggaacatccttacgccttagctctctagggcgagcgcttgacggtcgttcggctcgagatgtattgtcacgccatcccgagatcagcccgccatgaaagtccagtcggcccgagaggtgagcaagcgggatctatcttgctcatctcgtgcgccactgatcgatcgacagggggatttgacagggcagagcagaggggagtcactggttgatgatgttagcgcgagatcagtcacgcggtttattttgatctgtctcggattcacctcgccttcccctccgcctcccccctctctcgtcatgattcatcattttggcggtttctttcatttgccgttcctcattcgagggcgggcgagagagcgagcaaagttccgaaaagggaaacttcaagagaccatccatcacactttcactttcagagtcggaccatatccgaaatcgtcgttcatgaatagatctcgacctcgacacacaaagtacattcgtccaaacatcttctctggcctctcgagtctctcatctcgacatgatctgcatcgtttgctactcgtcataatacagttagtaccacagtccacttggcacacagacgcgatcagccgcgggtatttcgaaccggaacccgtgcaaccagatcgcctccacaccggagatctccactgtgccggtcttgatcacctatcgttggctcaaccgcgttcgacatagacaacgatgacggccatcgtacatcccatctccatcttctccttccctcaaccagacccttcgagcgtatcccctgagctggcctatcctggggacaaggttggaccgcgtgatctcgaactcgagcacgagcacgagcacgacttggagctggactcgacgaccacgcccagtgcacctcattcggacaattgggccacggatgaaaaccaaagtctctcccccagttccagcaagacgagttcgagccctaccgaacgggatcatgagcaagatcagctcgtcgacgaggacgatggcgagaggggtacgacaccgaagacgccggtggagatgagtttcgttcacacgcaagaatcactctcagggaaaggtctaggcctcgaaggtctagactctacgggagtgttcgtcctcaacacggaagatctaccacaagaagataccttgcccagtatcctccccgttcccggctactctcaacgaaagaagagcataccaggacaacccccacccgtacctcctctcaatatcgacccacccaccccgacgtttgatcaattgagccggttcgctagtcctccaaatacgacgaggacgatacagacgatgatcatgccctgttccagctcgatatccacctcgatccggggcggcgaggcatcggaacccgtctccccgctctcgacgggctcgtccttgcccaccccttcctcggaagatcctccaagcccagcctcgggtgcgatttcaccctacacgagattaggactggggttacccttgggatccacgtcgacctcgcccaacccgggtctcctctcaccgaattcgataaagaacaagaggttgagcaggaaacaggccccagcgctgaccgagtcgttggagaacctgacggtagggagtacgacgaccttgcccgggacgaccctgaggtcggctttcggggctgtacctggaatcggaggatcgggagtggacgaatggggcgggtggaaagggttgaaagagtacgatgggaagagtccggtagatctcggttggccggtcggcaagcaagcggcgacagcagggttgggggtggcatctgtgatggcatctccgacccgcaaggcgggcgtgtacacgaccacgagcgcgaggagacaagaggacgaacggaggacatcgagcacgacgctcgggcttggaaatggcgggtcacccgcgggaacgggtaggaggaggtcgtctgaagaggagaagaaggagggtggaaaacgcaagagcgcacagttcctctcgtttgttgggtttgggagaagaaagagcgatcttcagctcgagccgcctttgaatacgcttacaccgacgacgacctcgacgtcgatggaagaaagcccagtcaagatctcggtcgaggcgccgccgaggttgcctcccattgtcgtggatggtgatcaaggtgtccagttgaaggtcttgcccagcacagagacgttgccccatcccaatacgatgtcatcgttggccccgcctgctcggatgcatgtaccacggcgattctcggctgcacagagggaacgtaaacggatcaacccgcccctcattcctgcgaggatggactctctccccctcgatccggcgagctcacgggcggtcctgagtttgaaagacgagagtgccaaggatcgacaacaattgccgctcgatcatttctcgtttggacagaccgaaggggatgccatcgtcaagctcaatgacgacaggagaccgtcggaacagacgttcatgacgggttacagcctcggcggtggcgcagggggtgtttccacggacgacgagaggatgccttcagggaccatcgacttgaacacggacgacgatagggacgaacaggtgcgggaccgggccaggtccatggtcacgctcggacaaaagtcggccatgaccagtacgcccgtcttgttcacccgggtctcgtctacgaccacgacgacggcgcggccgagggaagatctgccgttcggacgctctcgacgtaatgaagccggaggttcgggcgcctcgacgccatccgaggtccaagccgacgatggatttaccccgaaggctgccttgacgccatccagctcgttcatccgtcacgctcaagccaaggccatgtcccagcctcacctcgctcaatacgtccggagcgagagcaggccgtctatgaagtcggtcgtcgccaagaggcggccggtacaatgggcagagctggacgcgctggaagaagaagaggcgaggctcagagctgaacagcggcgagaggatcgggaacggagggacaaggacaagaaggagggcaagaccagaccagtgatcattgggcgaaggacgagcgcgaaacgcgctgccgcctcgaccgctcgcggcaacaagagcgggacctcgaccgacacgtcgtctgatggtaccaagcttaaacgtgaaggattcagggaacgacgcagccggctgaagagggaagccgaactgtttgacgcccttcaaaacacgattcccggtcaagacgacctcatggctgcaagcatggtcgaaattagggatgatcaggggaccaagatcgagtttggcaagttgatccaaggtggagttgggaaacgctacgtcgtcatctttatccgacattggtactgcccgctttgcgcccagtacaccgagagcatcatccggaccatcgatcaggaaccactggatcgcgcgcaggtcgagctcatcattatcggcaacgggtcgtacaagatgattcccgggtacagcaaatcgatcaagtgccccttcaagatgtacaccgattccaagctacggctgtacaaagcgttgggaatgactcgacagacgggtgacgctggagccgaggacgaaaaaggggattacgtgaggatgagtaatttggagagtacctggcaggtcgccaagcgggccaccaagatgccgctgaagaatccagggtaggtcgtcgtggcgaggcgggtatcttttgccaacgttccgctcataggcgacctctttttccgacccgtgacagccactttactcagatcggcggtgaattcatttttggcggaccgaccgagtgcacgtatgctcatcggatgagcaatactcggaatcacgctcctatacgagatatcgtcgccctcgccggggtccatctcgatttctaccatggcgagcgaggtgagtcggacgcggtggctcgtccgcatcgtgtcggtacctacccctcgactgacattcttcacccatcgaccgcacaggtccaccaccgcccgagatccatcgaccgaggatggacggggataccccggacgggatgatgtttggcaattggggagaatccgggatcgagctcacccaggcggagaggtacgccatggaatcccgtcgagagagcgagggagaaggatggctcgtcgctcgggaggaggaactcgaacgggtccgtctggcgagaaaaggtcgacggtcgaatgccggtctgccaggggaggcttgtatgccccagatcttgagcgattcagaggccgagctggacgggccccgatctggacctgggagacgggggagtggggcaggggggttacacaggacgtcgagtcggtttgtcgagatgatcgattcgcccgtggcgacgacgatcgaggagaggagcgaggttgaggactcgagggaggctgtctagcatgtctctcgtggggtgacaggtggtgtgtgtgtgtcaaaccgatgcgggctgtaaaggcaaaggcctgaacaaccatcataagacagcagcaacacatctacgactgaaagtacgccatcaattgagtggcagtcgtgaagaggtggttctagcagtaatgaggattttggcaagtgggatactactcgacgattcattgatctcgcctgcttcgacatggaacagagtacatacctaggttctcgtcatcaaatcccggtccagagactgtaagaaagacgaaatcgatgggagtcagggaggatgcgttggaaggagagggttttagaaataggcgatatgaaacagtcgttgaatcaaatatactgacacgcggccttccctatctggccaccggggtcggcgtctgtactgctgtgacctccctctctctctcgcagctcgacggatctcattcgaagcgaatatttataccaattcgatcacggcctatgaggatggcgtgcttgatcgtttcccaaagatgatataacgacattatcatttattattgtcaatctatttatgccgagccctattgatcaaaacaggaaggagaaatacagagtccgaaagcgtcgggagcaattctcataggcaaaaacaacgagcaacaacaagttcccgcttgtaggctcgttccggacgaccttgcacgcaccccaggtccagcgacccaagtcgcttgagagggacttgacgatggatcgagcgggttcgaacagcgaggtgtcaggtcactccgatccgcacacagggtccgttctgtcaagtggatcgaccaatccgggactcggggagtgtgacgggggctaaaagaagcgagcacgctcaggggtgaccgaccccgcgtggtaggttcctcaccggggattttgagcgagcaggagacgcgattgcgagatgatgataaacgtttgctctctctctgctctccgtctctcttgttcgctctcttgcaagcctcgcccttttccgcttttcttcttttttagtgagctcggccttgtcctctcgcttgcagatggatcccggccgcacaccattctgtcccccctccctccaaccatcccccttttcccgtcgtttcccactcgccatccccactcttttgctcccaactttgtgcgcgggggttagaagctaaagatcgacattggacccaagcgactcgttcggggcgtcacgtttattgctatcgcacctccctgctctgctcctcacctctttccctctctacgtcgtcacttcccgtcggacgatctcactcgcttgagagtgatccgatcctggcacagagggtggttgcagcagtgcaatagaaggaagagactttgggatctgacgagaacgatcgactagcgagcggcaagcgaccgttatctgcattcgcgcattcgatcgtctttgcttttcctgccctttccttgataccatacgatcagttccagcttcagaaattctccttgctttatcgtgcttgacatcccctagctctcgctcgtacgaccctatccccagtccggataaatctcatgacccagcgtagacacgcagagtgagacctcgtttcggccctcgacctgactcaccggaatcgcgaccccccccagagtacgcccggtacacagcccgcactttgacctagatctcgcccactttcgttaaccttgggatatcgactcgtgctgctgcttgcattctcccgcccagacctcgtcgtcgtcgtcgtcgccatcgtcctgcatcgtctccctcacttgcgtgtattttgctcaccagcaccaggggatcaatcaggaaccgccttgacccgctcgataaacgttattttcgaaaaagaggggaacgcgataacaattgcaaactagctgccagctgcaacgtctatcatccggacacatctctctcttcctctctcttggtctctcaattcgtcaacatcactcacagctgtatactctcatacactactaccctcctcgcaaactactcctagctagctgtaactcggatacttaccttaccgaagcacggggttgtgcgtctcacaaggcacggagacatcgtcgtccgtcatagggtccgggcctcccctaccaaaaacgcaacatcgagatcttttcggaaaggctttcgacgagtggaacgacccatcataggcacgagtcccgaccgtattcaccagacctgatagcgtagggatcatccacacgatcacccgcccgaccctgctcttcctctggccgaccgtccgatgccccccttttccccacttccccctcgtcatatccccacctcacctagcagcaccgattccaccagcccttcatcccccttctcggcatcgtccacttctcggacgtacggtggggtatacagtacggccccgacgagtcgggttaatacgcccgggatgagtctcaaggaaggaggaaggagcgagggggacgaatgcgagtcgaggtcccatgaacgagaagacgaggaagttgacgaacaagaagaaatggagcatgagcagagggacgaacaaacgggcaggaagatgagaggatctctcgggctcgatggagtagagttgggacccgtggtcactggcgaaacgcagatccacgtcgaccccctctccatcccaggatcatcgtcttccccctcttcccgtccaggtctgtccgaacaaaacttggccaaccactcgaacgcgtcgagctcgaacaggatctcttcctcgtcggccccgacaaacacctcgggagcggggtatacgaggacttcagcaccgggggcgagcaagatggccatggctattgccgcgagaaagggaaaagggttgcctctcgaggtggacgacgaggtggaacacccgttgagtgagaaagcgctcgccagacggtgagtcacgcggggaatcgtcccatgttcgcatatatcttccatcccccgggttgagactgacaaaacaccgaccccggtggtcatcatctcagtgggtatcaatcgcacatcctcttcaaacacgtctttcacctggaagaccgctggacccggcttcgagaattagggcagggagcgtacggactggtcatctcggccgaggattcgatctcgggggaaaggatcgccatcaagctcttgactagggtgtttgacaaggtcatcctcgcaaggaggtgtctgagagaattgacattgttgaggcatctcaacgggcatgagaatgtgggtcgaggcgcggctcggatcgtgacgagagaggtggcacaatggaagctgatgatgacgggtcgattttgtagatcacggggttgatcgatctcgatgtgagcctcttctcacgacctctttgacccctgcgcgtcgctgatgcttgtttgattcaggtcgtgctcgacgattttaatgaaatgttcgtctggcaattcaataggtagactgcgagcgagggctgatgggtctttttcgagtgtcttagttacctcttcatggaaccgatggaaggtgagttgttactacttgcaaagatcgttccaccctcgctcacctttacctcggacgcacagccgacctccatcaaatcatccgctccggtcaacaactcaccaactcgcacatctgctactttctataccaaatcctgcgtggcatgaagtacatccattcggccaacgtcatccatcgagacctcaaaccggggaacctgctcgtcaatgccgattgcgaactgaagatctgcgatttcggattggcacgtggattcaaaccggatccgaccgaatgggatccgaattccatgcctgaaggaggcgccatgaccgaatacgtcgccacgcggtggtacagggcccccgagatcatgctttccttcaaacggtactcgacagcgagtgagtcgagagtcacagtataggccgataaggaattagctgacgcgctcgcttcgtagtcgacgtatggtcgatagggtgtattttggccgagcttttgggtggcaaaccattgttcaaaggcaaagagtaggtctccgggctttcatatcgacttgcaacgcacccgtctgacctttgccccccgcagttacatcgaccaactcaacctaatcttgcagacgctaggaaccccggacgaatctaccctggaccgggtgggcagcgaacgcgcatgtcaatacatcaggagcttgcccaaaagcgacaaggtgccgtttgccgaattgttccccaacgccgagcctagtggtaagccgctacgtgtttagacgcgcttcgagacgtgtgaagctgatgagcaaaaccactagccgtggatctgctggagaagatgctcactttcgaccctgccgaccggattacggttcaagaagccttactccacccgtaccttgcaccctatcatgacgagacggatgagccggaatgtcccatcaaattcgacaaatgggaagaggtcgagggcattcaatcgttggccgagttccgcgagacgattcaccgagaagtcgaggagttccgagccgaggtacgaatggtagaagaatgggattcagattcgaatatcagcgggatccagtccaatgcccttaccgacgaggattcggcgccggagcgcgatgacacatcggtggcgggagacgaccgggtcgagacgttggctagtcctcgggagccagccacggggacgcctcgcgaagtcacgacgccgttatcggctacctcggagctatccagcgcgagtcacatccgaccaggccgtgcaaaacggagcaactcgagcaactctggctttggcgatccgttcggccgacggcccagctcgatattcggcctgggcttgggaatgtcgggtatgacgcccatcgatggcgggttcagagacggtatgcatagcctgcctcgaggccacagcgcacgcaattcgatctcgatcgccgagctcagcggtagggtcaaatcgagacaagggtcgtcttcgtcttatgtccgaccgctcttgcgaagcctctcgacgttgtcggtctcggatctcaacgtggccacccaccaggtcggcaacgaaccgccacccatgaccgtttctgcttcggatgccccgccaagcgaggtgagtagcgatatggccatctctccggacgagagcggagcagctgaccgtcctggccatgaaggcccctcgcacgttcggaaccgtccataaccgtcctcaagcttcgcctcgatcatgataatctgcgcactcgcatgcagagatcggcaacaaaccacattgatacgacaattcagacgacatttatattcatcttgcatctggctgcacaacattcacacgacaacgtccgcggcgggaacagggccgtgacggaccgactgttgtgcttctatatcaaagacgttgagaactttgtagattacgcccagaagctagaaaagacatgcatacctctcgacaagatctggaagtggcggggcaggaagaacgcgacgtcgctcgcgttcatccaggtctggagccgctcgcctagccaggacatggcgcaccaacgttgattacagagtgcagcaggattagccagcctggtcggtcaactctccatcgtcctctacattacgagcagccgggccaccctcttcgaggtcggcgaagccttgggtcatgctagttctcgcttctaattccgctcgctcgattcacatgtcacgtatcacacatatatcgtttgtgagcagatccaccatcttacaagaccgcaagcgtatacaacaagaccacgatggctacaataggccccgtagaggcaaaggacaaaagggagcgcggtaacgaacgaccagggacgatccagatcatttcttcctccccttttgcttctgtttcggtttcccgttgctgtcttcgtacccgagcacggcgacgcaatcggggcagaaccaggtctcgggcaagggaggttcgagcttgacgcatttgagatggaactgtgaggggcgatcggaccgagaggagacgtgtcggtacgcgctctacgtaacgaggtatcgagaccgggactcacccattcgaacctgcactcttcattgtcgcacccgatcatctcgccatagctcttttcctggcagaaacaatacaacgcattgtcgtccgcaccctcttcagcctcgccctcggcatccatatcgacctcgatctcgggcgtctggctggggagtcggttcttccgaccttggcccgtactgcgcgcagagagggggatgtgttgatggtaagacggtacgcctgaatggagggccggcgagagattgatggccgaatgagcgtgcgaggcggggaggtgtaaagcgggcaaggcgggaggaggcatgtcgtggtatgatggggtgacgttgccggacatgtgggtggatttccgttctgtgagaggcaacggtcataaagtcagcacatcgcccccctgtttctgacgacaagggccggttcggcgagggaagaacaacgcgagactcactcttggtggtacgttcgtccgaggcggtgacgacagagatcgtccccggtccgacggaccctcgttgtgaattcccctgactgaccaaacccgaccctggcacggctccagccgccgaactcggcccagcgacgatcatacccgctcctcccgtgtactgattgaccatctgggccaaccctgtcggattactcagatcgacctcgcgttcggccttgacgagcccgtccacgacttcatccccgacgatctttttatactcttccctcccacgctccttgtgacgggtgacgatcgagacgagacgggtggcgagcgtcgtcttttcagattgaagcaggtcgatcttgttccattcggcggtgatcttggcataagcctggtgatccttggtagagagggggttgagggaggtaccgccctggggagcaccgttgggagtggaaggatggttgttgttcctagcgttccggaggacggcggtcgtacgttgcgtcaagcgggtttggatctctgtcgtaggtacaacaaggtcgtcgtcgtcagtgccagtgtcagacgggtggaagatggattcatcgtctctttgcgggcttaccggccatccgttcgtccttgtgcgcgatctctttcaagatatggtccacttcgttcgcgacattgtccatcgctacaacacataaaaaacggacgacccatcgcagtcagctgggaacacgcctcacatactttccacctgagccagactctcacagtgaaaaaaatccgtcgctatggccacggcgtcctcgttggggagttgaggcgtcatgaccgtcggtgtggtcccgaccatgctgagatcgttctttatgtaacctcgaggggtcaccgataaccaaagtctcgagggtgagttgggtcctgggagccttccgatgctagtacgtggtcggttgaggtacgagaaagaaggtgtgtgaacggtgatgtatcgttgtgtgtggtgatctaggtttcgttgttgtatatattttctggatgaatcccgactttgtcaaggttgagacgcggcaaagtccggagtcgagctaagtaagcgtgaacgaggtcgtcaggctcgtcgtcgagacggtcatcgacctcgataagatcgctcagctatccaaagagactctagatgggactggaggacggtgtcagagctagcgatgtactattgcgacctgtgatgttgatattgcgaccatgagactgttgtgaacctgttacaatgtccatcctcgagcgctgcccctttgctcttggcaaactcgctctcacacaaacactcgaccaccttgtactcactctagttacttgacacgacattcatcctatccgtttcgcattctaaataccaaagatccttcaacgcatcatacgacacttcaactacctctagtcatgccaatcggtatataaaagtcgaacctgctcggacatcgctcgacacggcctcgttcccactgactactccagggccagctcgatcgatcgcgcccaaagcgtcactctgacacccccacaaacacgcacatctacaaaggtggagatcaggtccgaccggtctttctttcgaacggcactggacatacaataggcggcaatacggatattctgattcggcatctcaaggattcacgacactcgcacggacagcgttgacctcgacctcgaccttacctcacctgctccgagcgaccatctgaaaccccaacccacaaccaacatcccccgatggccgagcacaatcactttgacctggggagaccgctcgcaccatccgacccggtcatcatcgatgacgacctccaagcggacgatgtcggtcatctaggcaagaccccaccgaggagtccggcagatcggttgaaacacctgaaaaaggtaagagtcggactgttgtcgtcgtcgtcgtcgcgcttcaggtaccgtacaactcgggatatattgcgctcttgctaactatgtcctcatccccacctcctccgtgggacgttatacgatccacagcgtctaggggaagacgtacctccctcacccagctcggactggcccagcgtactcgtcggtcccgcggaccacatgacaacagggtcgagcaccacttggtccccgatcggccaaatgcaaacctcggcctcgtcctcctccatacccacgcctacacagctacatggtcaaaaccacagtcagggggaatacaacgtcgctggtttcttggacgggtgggatagtcagatcccgccctgggtcggaggacacgggcagggaagaccggggatggagagtaggacggggagcacggggacctcgacggggaggaacgagggggccatcgctccctggttgacggacgacgctgaatctacattggacatgaacaataaccgtcctgggaacaacatgtcgatacgcgctcccgctaggaatccttcttacccaacgctcgcccctagtggtggatcgtttgcgggaccgtcgacggggtcggcctcgcgtatcggactcaggcagaaatcgctcaacgtcccgtccagtaaccctcatgtgccactgagcacgttgacgaccatcgctgcgtccccacccgggttcagcgggttgagcagcggggcgtatttgcagcatcacgaggccgggacgagctcggggttcagaggagaaccgggcaagagaccgtcagagatgagacgtgaggggtcgtactccagtcagacatcgacggggggcggtggcacaatgacgcacaagttgtatcgtccgacgacgagcgcgagcttgcaacgcgcgaggagctcgagcagggatcgacaggggagtgacgattcttccactctggacgggtatggactcgactcgacagggtcgatggtaggcacgtcgacgatggcgagtagcgtctcgaggttaccgcccgttagtccctcgggcgcaccttcggtcaacgggttgtacagggacgtccggtcgggtagtcagatcagcctcggatcgacaggaccgggacagcagtatcatcaacagctcttgcagcatcaacgcgaggcctcgggagggcatcagggggacaggaagaagggattgtcggcgttgacgggattactcaagcggaaaggtggttcaacaggacgcccatccacaggggggtcagacgggacggggtaccgggcagagcaacaacaggcgagtcccggatcaacaggaccgacgtccccttccagacctgcgaagccgagtagaccgggaagtgcaaatgacgcggtggctcctcctttcggctcgacgagcggaccagattcggaccgggcgagaagaaagacgggtcacaacccgagcgtggtcagcctggcgacatcgacacatgcacccgcagaagaggcggaaaagggtcgtcactcgttgggacggggattcttgtcaaaggcgaggaagccgagcaagaaaccgtccacacagactccgctcgaggtctcggtcgatgaacatcccaaggggaccatgttcgtcctggacaccgatttggacgacatgcgcgggatcgtcaggcctcaccagccctcgctgacgccctccggatcagactcgcagagcacaggcacatccgccgggcccggtgtcgccgatctgagacgagacacgatcatctcgaccgcttcgtcaagctcgtacgcttacctcgacggtaggcctatcccgaccccgacgagcgaaaaggcgatccactttcgaaaagagaacccgttctcgggttcaggggattcgaccactagctcgcaatacggcgcgacatcgacgccttcgagccctttcacgtcattcgccaagcagagtctcacgtcttccgccaagatcaacacgaggaggccgagccagctcagaaacgtcaagttgggctcgatcgagacggacagtttcgaacagacccctttgcaaccactggacgtcgtggagtctcgcgaaggtactccgaccgtcttcaacgaggatccgtttggcgccttttgcccttcgtcgacccaggccagcttttcagagagaaaaggacatggcatgcggatagattttgacggcctaccgaaatccgatgtcacacgagtagatccgagggacgatggcatgctttcgcctgggacaggggcgcaagaattcaatctcaccccgctcaccgagtatcaacaaatgcaagcggcgtggacggctccagaatcgtggggcgtcgagggagaccaggtgcctgtaccagaagacgatccgtcgtcggacgaagtcgaagttgtagatgcaccggagtctcccggatcacctgcacctgccgtactggacagaacattgggcatgcctcatgcatttggatcgaaacctgctgagcggcggtctaaaacaaagccaggcagtagtgccaaacgacctaccacgggcacgggcaaagtcgctgttcgaccaacgacgtcaggaagcgcccacgccgccgtcaatgtaagcgacgtgacacctttgtctctagccctcgagagtagctgacgccgcctctttccatacagcactttatccgcatatacaacctggacactactttttccacattaacgttccctctgactgccactgtgcaggacatcttggctgcgctcgagaagcgggtcaaggagggaaaattgcaatcgcaagcagcgcctggtaacatgaagctgtatatccgtgaacggggccaaggcgagtagtatcactcggttttcaatgtgcgcatattgctgactgatatcgtctcgtttcccgccaaaccagaccgattattgatgccccatgagaagccgctcgctatccagctgcgacgtctactgcaagcggggtacaatgacgctgaccgggtcgatgagatgggtagagagaatttggccatgctgtgcaggttcatctaccaaccgccgatccttccaatcattgatccagtaagtctcctagtctcagcgagctgattgcgcttactgacttcactgctttgttaggaggatgaagggagttatgaatcgttcgagctcgtggaccttggaggtcgagacctgcaagctgtcccaatcttcctttatcgacacgctcattccatcatctccctcaacctctcacgaaatcccatgactgacctcccgctcgatttcattcaagcatgctctactttgagggagttacggatgacccatatggcgctcaagcgggtcccaccgagtattcggcagagctgcgcgatcactcgtctggatctgtcgtgcaaccgcctcgtcgacctggagcacgccggattgcacgagatctcgactttggtctcgctcaaagtacaaaacaatcgtctcactaccttgccggcaaacttccgcgagctcaaaggtctcaagtacctaaacatttcgaacaacaaattcgtcaagcttcccaccgttatctgcgagatccacaaccttgtcgatctcgacgtctctttcaacgaaatcgactccctaccagctgaattgggtcaactgtcacatctcgagcgtctggtggcggtaggaaactcgttggtgacatttcctgactcgttctcgacgcttgcgagccttcgagagttggatgtcaggcgaaactctttgacaaacttgaacgcagtctacaccttgcccaatctcgccatccttcaagcagataataacaatctagtcgtactggatgcgcagcttgggccgaaagtgcgagaattcggagtccctcacaactcgattaccaggtttacgctggcgcctctctcggcgacggctacggcatatagcttgtccgtactggatctgtcctacgccaagctatcgacgctggcggaagacgcactcgctcaattggtcaatctacatacgctcaacctaaattacaacaagttcgcccgccttcccgagacgctggagaatttgagcaatcttcgacacttgtcctgtacagacaacgtattgactgctctgcccagcgggttaggacgtctccaaaacctgcaagtcctcaatgtccacaacaacaatctgaaggaactgccctcgggcctgtggcaatgcaaaaatctgagggaattgaacgcgagttcaaacctgctcgaggcgtttccggagacacccttcagtatgctggatgccttggcgatgcctcccgaagggaacgaacgcaatggtccagcttcacctggaactaccgattctgaccgattgccgctaagcaaaagcttgagaaagttgcttctgtgtgacaatcagctcgatgaagagatttttgattccgtctcgatgctcgaagagcttcgcgtgctgaatctcagcttcaacgatatttacgaagttccgacatggacgatcagcaagaaccagaagctggaagaactttacttgagcggaaacaacctgacgtctttgccttcggaggatctcgagcgactgactaacctccgggtgattcacgtcaacggtaacaagctgcagacactacctgctgaacttggcaagatccgtaggctggtcacgctggacgttggtagcaacgttctgaagtacaacattgcgaattggccttatgactggaactggaactggaacctggaactgcgatatctcaacctgtctggcaacaagcgactggaaatcaagccgagtgcgcagcatgaactggcgtacagcggcggacttcgacgtgacttgtcggacttttccaagctcagccacttgcgcgtgctcggtctgatggacgtgactctacgtatcccatcgctaccggacgaaaatgagcatcgccgagtgcgaacgtccttctcagatatgaacgggatgggttacggtatctccgacacaatcgggcaatcggatgagctgtctcttctggatctcgttgtcccagactttcgatctcgcgaggacgaatgcttgtttggaatgtttgggcttgctgtcccgagcgtttcgggtggccgcgtaccaaaattcgtgcaagaatggatggcgagtaatttccacgctcaaatcgacaagttgaaggaaggggacacggtagaagacgcgcttcgcaggaccttcttgctggtcaacaagaattgttttgactcactagtcgctgaagagagtggaaggaagggctctggaggcagcaccgcctctcacacagcaacaaccacacctggtaacacctacacccctctttcacaccagtatcgaagcggtgctgccggcgctgtcgtctacgttgtcggtcgtacacttcacgtcgccaatgctggaggcattctggcagtcatttcgtgcaaaggagaagccgagttgctgtccgcccagcatgatcccttcgacaaggaagagacgcagcgcatccgagcggccgaagcctgggtttcgccaagaggcctcgtcaacgacgaaatccctctctctcgcggatttgggttctttaatgccgttcctgcagtcaactcgcttccccaggtcagcaagaggtgtctcactgattcggacgaatttgtcatccttgcgaaccgagcgctttgggactgctgttcgtatcagacagcagtggacatcgctagaacggtcaaagaagacccaatgatggcggcgcaaaagctgagagactttgccatcagttatggatcagaaggttccatcatgatcatggtcttgtctgtcgctgacctgttccgacaacgcccgatgcgatcgcgagctgcattgccggacaaagaggcgatagtcgacggcgatggacaccatgccgtcaccaagcgagtcgcacgacgtaggatcgaagacatcggcgacaggactcttttgcgacttcagcaagaggtcgagccgcctatcgggcaggtggctatggtcttcacggatatcaaaaactcgacttcgctctgggagaccaatccaggcatgcagactgctatgcggatgcataacagtctactgagacgccagttgaggatcatcggtggatacgaggtcaagaccgaaggagatgccttcatggtctcgttcccctccgtgacttccgctatcctgtggtgctttacgtgtcaattgcagcttctgaccgaggactggcccagagaaatcttggagagcgaagatgggcgagaagtgtgggacagccacggcgagcttatcgggaggggtctttcggtgcgcatgggcattcattggggcaacccggtatgggaaaaagaccccatcacgcgtaggatggattacttcggaccgatggtcaacaagtcggctcgggtgtccgcaagcgcagatggcggtcaaatcatggtcagctcagacgtttacaaagaagtgcaaactttcaagaccttcttggatgaagaagacgacagcctgtcagcggaactacaggatgaccttcgtagagagacaacacagcttcgaaaaattggcttgggcgtcttggagatggggaagaagaagctgaaaggtttggaaggtacgctcggcagaggcgactcatctgaaattcgattcggttgctgatgactttgccgccacgctcgatgcacagtaccggaaaagctatttctgatctatccaaggtcgctatcgggacgtctggaactatctgctcaaatccgaaaagacgtcgagagtcacgcaccaaaggtctatggtggagaagatcgcataatcgatatcgacgaaatgaggcagctcatccaagtgtgcttgcgtctggaggctgttgctgcagctgcccatcaagttccggtaatgcaacctgcatcgcctgggactgtgacaatatcgccaagtcagaaagctctggcgagaagcggttcggtgaagcgcaccaacaccgcaccgttaccagctgtgggagtggctgcattcctggggccaagaatttcggaggaaatgtctgacgacgagctggtcggggctttcacgagtattacgggcagaatcgagaatgcgatatcgaccttggtgagctggttttgatcgagttatcggctatattccagtcttgctgactttgcgcaatcggcagactctgttgcgcttgacgtcgctggtacccgagttggcagctttgaatctcggcttcaacttactgtttcccagcagtggccgatgaagatcatatcacagctaatatccagctattattgtaaacaataaacagttgtatcactttgcgcgagacgttgtactaattcaaggcccgaagatatgtggaacttgtactgcaacctgcatgtcgattgttccgtcattgacagagtaggcgtattacaacgatggaaatctatatacggggcctagcatatggaacgaaacctgcctattcgggatttacaacctgtaaagcaccacggctcgctacctcgtacatggtggtgggtcgtctcggccctcggggtccgcccagtcctcgatagggagaatgtatggcgggggctgtggccgcgaatgcagcagtagacgcttgcaaaggacttggagtgggcaagactggcgcgtctgctgcaaaatctcggcgattgatggaatcggctagatccctcaccgtccttcttggtgtcaagtcgatatgtgtcgggtggcgaggagcggccgtgcgtgggccctttggtgtagttgtctccctcaatcgcggggaactgcttcgaggaggggtgcgtggacgtgtgggggcaatgtccgtaggttgggcgatgaacacgtcgccgagatcggcctcctcgagcgacgcactgggctgtctggaagatgccattctttctcgctgtatgatttgcatgttgccgtaattgacaagcatgtcactcgtcgcggtcgctgaagtttctatggatgtgtaactttggcttcggtaaggctctggaggagtagacactcccctcctgccggaacctgatgcccgccgagcgtcacggtcttcagcgatcggttcaagacctggagggggggtcggatcaagaaacccctccgcttcggtatgcgaagcacggctagcccgaccgccgccgaagagtgaagctcccgctccagccaggcgactcatcagggattcgttgcgcttcaatggcaccagtgtcgccgtagtgcttagcaggtccaacctggtcgcggtttgtatggctgcagctccgacagagttgcgaagcgattcctttgagttgtaagagtcagcgctattatcagccgacgctccgtccacgtagtccatgatgccagtatcgtaatagttctcgatcggatcgtcgaaagggtcgggcaagggggtgtctggtagtgtctttccgctgactctacgtctagcttgcgaaagcccagcaccgactggggtcgtcaatacgccctcgacgtaatcagcatcgttggtcgaactggatgggatggctgggtgatggatcctgaagtctcccgagtcgatactctgtgaatggtccgtctgcgatgtcctgccacttgtctccttctcgtgttgtatgacttcacgtggtgctttccagatatcggaccgatcttcatcggccaggatatcaaagcgcggcgctcgtccactgacgttacggatcctgcctataatattggtcaacaaggccggttgaccgggagaatatgggttggcagaggcggcgtagcctttgattggcgcaggaggcgtccaagtcgattgatttgattcccgctttgtgggtgtgaacaccttctccgtaccgtcccagacatggtcatccagtaatccccgagcgccatctcccgaaatcgcataggcccgcctgctgggtccggcaggtctaccaccaaacggcttcaacatgaatccgctcgatactcttttgccttggcgccgacgccttataatccatgccaggagcgctagagcgatcaaaccaaaacaagcaaacgcggttccaagcgcaatcgcggtctttttgctcttttcgtcaggcgccgagggattgcttgtatctgtcggtgaaacgactgctgttgacgtcctgcgaattgttgccacccgcgtcgaactgactgcgattgtaagaggcatctcagcttgagtaacacataggcaggcctaaaatggattcacctgttaaccctgcttgatcggtagagatgattaaatctgtcgaagtggccgtgacgacaacgacttttgtcgtttggacgcccacggcaacggtcctggtagataccacaacctcccctgcggcgcccgtcttggtaacgaggatttcgcttgcagacacatcaccattcgatccaccttgtccgtcatttgtattcccgtcgctgtcaacgctcgaggcgactccatggacatcttgtgctgccaagcttgagattccggggaaattcgacatccaagcattcgaagcgacgtcgtaagcatatagccccgcatcagccattccagagctggttcggcctgttgcacgatctcagtaagctagcccttttcatgtaatcagtacttccattgcgactcacccccaaaaatcaagaccttcccgtcgatgcctatggcagcgtgctcgaacctctcgccaggcccatctacggccgctctcttgcttgcgccgttcaaggattgccctacaagcaatgaagaccacaggcctagctcgaggtcaagttcccacatgtcttccaagacggaggagctgtcaacagccgccgtcgagaccgaggtggatccgccgtaaagaatagcttttgatgcagagacgaggactagcgaagatccacgtctggctggagggagtgctgtcgccgtcgatgtcaaatctttcaccgcccagtctgatccgcctggggaccgtgaatatgccttgtcgagagtcaggaattgcccagaagaaggtatccatccaccaacgagccagacggttccatcccgcagaaccaacgtcgaatgtcccgccagatcagtaggaagacttccttcaagctgaaaatcgacgttcttggccgtaagggtcacaaaatagacgtcattgaagcctaggccagatccgtcacccttgagccctcccgacatcagccatgatttcttgtcgatcgaaccgctagacgggtaccatctcctggttggctgttccgagccggaaacatcgacggcgaccatgtcgggtccggttatggaagagattccaagcgaatcattgttcgtctgaacgggcaacgtcggtccaccatcacccccgaaggagaccaagtagcctgcaccggaatcctcctccaggtagcccgtactataccaggcgacgcttcgctggacaccatcggcgagttcccatggggatgtttccaagtcgaaattattccggagggagaggactagcgtctcgtcgatcaaggggcccgaggagtaggtgtatccgcctgtcgggtctgatcgaccaccctgcacgatcactcgtggattatccgatgacgggatatatgtcaaagtatgaccccatctatctcccaacgaatgattggacattggtttataaaatgggtggtcagcttgtttggtacgcaaagagcagattgacgctctttggcgtaccttccgccgggagtcaaggccgcgaccaccttgaaaccgggtgttgctagcgacataagcccgcacaagcatgacctcttcatcctcatctttcaactgattgcggtcgttgtcacagagcaaattgcgtgcgatcgaaaaagttggtatttgaatcgctcgttacttcgtagtcgtagataggtacggtcctttgacgcctttgatgatctcgggtgtctaaatgatcaaatcgtcgttggacggtccaagagcatgaaaggaactctctccgcaagaaggtcgcgattgcactggacttatcctatgtttgcatgtaatacgatcgatatgtcgtggaaatggagtgaaccatccgaagctacgatcaggaatagttccaagtgtccggtatgatcatgatgaactttatcagaaagatgtaggagaatggggtttgttatgttttcggaagcaatttgattccggaaaactgacgtatttagagttttgcatccgctatggcgttaccgatgatggcatccatcagccgccgccagacgcttactaatgtcgcgacactctaacaccactatcatggcaaaatcggactggggttctaacgatttacgactgttttcttgctgtcatcacagtctataccatcgagccccttatataggcgacactgctaccttcacttgacgatatttctagccgcccgaggcatcttgaaccgcgctgagctgtgtgggatgtctctgcttctgacgcgcggcactcaggccggaattcgcaccccttttaagctcgccaagacgttccggctgacttgaagactggcagcagcttcgtctcggatgagtgacgatgatagtcactgtgcgactgaatgacgaggttcagttattggtatcgtctagccgtccgtgtcgagcaagcgatatcggcgatattctgcaatcggacttgcttctgaagccatcagagcgctaagagacaagcaccgttagcatattgtacaatcagctttggtcttaattctactggtctacacaagatggtacaatatgagtggtgtctatcgtctccacctacaaatctgaatgcaaacgattcctttcccccaagaatcgtccataatactagtgttctgcctctccggcccattcgcaatgggaaggcacacggttgactgctcgatctcattcgagccaatatctaacgaacagcaagaatggtatcgcgacctcgggtgcgactgggacgatgaaaatcagggctatcttcatacaggctcgtatcgccttggacaccgcgatccatacacgtcatgggaaaaaccaccaattcaccggcctcaggaagatcgagatgatctgttcagtctgagacatcccaaccgcagactagttggctcgaagcaagaggtcgaacaagattcagcagcgtcaatcgagtcgtgtgcagattatttcaagtgcggtggacaccagtggggatacgtcattgatgtttttgcgtcgaaccggagcgagcgaatattcctatgcaagagattgaccaaagcattccgcccagagttgatttcgatcaagccaacaagaggagcagaaacaaggttcctagacatgcaaaagcgaggcatctcttttttgcgatctgaacaaggaaggatgctgaatggactattcctcgagcgaacgatacccgcgcgagaggggtcgagtgagcagtaccagatacctgagccgtggtgcgacgtgaataatggatgtcagcggctctgcgacttgctcaacgccttgggctcctttttaattggggaatcatacgaaaagctctttcatttgggaggcaacgagtcaacgagcgccggagaacacgctgtacataaatcgaccacggatatcgtagttctcaagaaaggaaggcagaggctcggttcgtatggagcattcgaattagctgctgtggccacggggaacagctggcctagtaaagatgccggccttggccatacggttctacccttcgctaaggatgtcgtaagtgtccaaggtctacatgtttcagctcctccttgactgggcccatgcgcaatagtgtcgactcatacgtggaaatccaatcgcgaggaccggcttcggtttcacctcgtgcggtcatcgcctaaggtattggtcgtttggacccgatttttaccattcctcgcgtctcattgacctgaagaaggataatcacctgagcgatttcgtcgacttggtcatcttcctccttggacctgttgaaaggatcctgcccagatggcagccggactgtgagctgtttgtcgtgagaccgggcactaaagacccttcacgtacaggacaatggcggccgaaagatggacagtttggaatcgtatacctgcgcgcagaaccgacaggcagccggacggtagtctggcagggttcttttacgtatcaaccgggaagcctccgattatcgttatcaaagcttcgtggcttaccaacgatttagctctgcacgaatacaaaatctggactgcttgctcaatgacaacgcgcgcttgcacttcccaatggtgggtccagaaggcctccacttggaagagcatgtacagaaccatggacctggcgatgagatcggagatatcgacgagattcggcgcaaactgctttaagtgcttggtatagtctctcacgagggagaacctaccagcaacatcggctcatccgccgcctcgcatcatgaagaacccacaagtccgcaatcaccggaggaatcacattagcgacactagttactgaaggtccagctgacatgagcattgaagagatagagtcatgaagtaccaagcagttttgcatcatattcctggacgtgtttcgaatattgtagtatctcgcatgtcgcggtgtgcatcatcgcgacctgaacctgggtaacattttggcgcgacgaaatctcagtccggacagggttgtcgattacatgggcgtcttgagcgattttggcaatgcaacatacgcaggagaacgacgtcgtctgccaaaaaccttggaagagaggaaagaagcccaccgggatgatgcaagatcggcaaatgcatacttttggtgtttagggtcgcacgagagtctgctttggtggaggctccagagcgcgctgaggcgtccgaagaggcggctatggggatgtttctgagcaaggatgaagcggctagcggtcacctagcacttgccaaggaatcagtgaaagcgtcccgagaggccctggaacagcatccacttcatcgatacatcaacgaccttgagtctgcgctatactgcatgtgctatgtggcgagtattggcttggaaccccaacacaaagcatgactgatgcgcttgtttctagttcggtatattcagatatggcgatcagaatccagctgcacagctcgacaaagaaaccttcaagagagagtcctggtatgaagatatgatgccggtacgttgtcatcctagttgtcgtgaaacccctgacgaaccacccgactgacgcgcgggaccctcccttgcttagctactgcaaggcatcgaccctttcggcaacttcctggagcttattcgagcaatatcttcggtggccaaagtcgtacgggaagctcaagcggaactacagtcgcaggaggggctaccgggcatcgaaatcacccgagtcgaacacgaaggcttccggaaatgcatcagaactttggctcaagcggctgaaacgttgcccgttcatcaatacatctagtttggtctcggcagagctaagctgtactttttcgacgggactcagctccggattccccatcgatgtatgatagttggatgtcccttgaatgcaattgtggaccactcactggtcacgtgacttgactgtccggaatctggcattcaaccaccctctaactagccgttgtcaatgcgttaatatgcatcgaacacaaatacatgcggtctttatcgccctgtcattaggctcccagtacttggaggctttgagtagcgcttcagctagatcatccaacaatgcggatcgtgcgacgagcattcgacagctcgcccggcatgccggtcatccgctgcgccatcgcatccaactcaaaagtgcgcagaacctttacgacgtcttcgcaagttgccgagaattccagctccaagtccaagaaggccgaacatcgttacaattataatactagtctagcttgggaggacgagccggacccaaatgtatgtcagaatcactcggcgctgatcagcactggctgactgttgtgcgcagcatgtcagatatagaagagtgaccgctaaggatctggcccatcgccgcgaacccccgaccaaggtgaagatgctggtcagagactttatcgatgacagtctttacaacgtgagtccccatccccttcctttccttatccttcctgctattcggtcgtctggcgcaagtgactaacccgccttgtagcctcattatggctactttgcgaaacaagccaccatcttctcgagtaatcctcccggtccccctgcaaccgctcaagacacccaatcatcttcatctcctactgctaccctatcttcacctacggtgcccgggtttccgatatcgtcgtatccgaatatgacggctttccaagaggatgtagcggagaagtacgaccagacgtacggggaactcgtacctgagacaaccagttcgggagctggggaagtccgagggggcaaaggaggattggggagacaagtatggcatacgccgaccgaattattcagggtgagtctagtcaagcggtgatcttgcgcatcttgaggcggcccttgctgaagttgtttcgcacgcattcatcgctctcagccccattactctcggatcatcgccaaatctcttctgactcattacaaacttcatcactggccatacaacgacctcatactctacgaaatcggggctggtaatggttctctcatggtcgatatcatgacttacctcagggacgctcatcccgaagtatacgaatgcacgagatacaccattgttgaaatctctgaagcgctcgcgacgagacaacgggaaaggatcaaagagcatggattggaagataaagtaaccgtcgagaacaaggatttcttcgattggcagggcggcagcaaggatccctgctactttgtcgcgctggaggtcttcgtaagctggcttgtgtgtaccgcgactcgaaccccatgttgactctgttggccgtttccgcccgggcaggacaatttcgcgcatgacatgattcgatatgatatgacgaccatgacaccgttgcaagcggtcgtgtgtatcgacggttcgggcgatttctcactgctgtacgagcaggtcacggatccactcgtcagaagatacctcggctatcgccgacacgtcaactacccgtactctccgacgagtttggcttcgctatggggaaaatcgacaaacccgctccctctgaatccactgctagcagcttctccgctgttgcggaaaatctacaatgccatgcccttcgcgccgaatctctcgccacccgaattcttacctaccaagcagatggtgtttttggaacgtctccgagaccggctgccaggacatcgattgctcgtcagcgactttgatgctctgccagatgcagtcgagggcaagaatggaccggtcgttcagacaagatatggaggtgacatggttccatgcgaaacgttcctcgtcaaacagggatactttgacatctttttcccgacgggtaagttctgttaaaaggaaatcccccgacgccaagctgatcgtattttgctcagacttcgacatgctaaaggaaatctactccgtgatcatgacgactccggccagccgtcgtctttcgcctggttacttctcgccacattcaaccagtggctccaactcgcaatcacaacccgatctaatgggcacgcatggattcaagcatagacatgtagccgtgtactcgcacgcggaattcctccaaggattcggtgatgagtcaagtatctcagggactaccacaaaggacaagaccaacgtcatgttgagtatgtataagaatgccaaattcatgttctaggggaacaggatcgtcggtcgaaaaatagatcacatatgtagccatacgagatttgacatattattgcatagatgtaggttgacaggggatgtggcagcttgtatttctgcttgacggattgaaccgtctcagtcaagagtttgtcttgccaagatgcgggaaacctctcgcttctgctccaaccagtcattgaaagacggctgctggctttctttgccttcgagcagatactcggctagcacaatgagcattgcgtaacgatagaggtagttgagtcccaaacgcaaggtcgccgtccgctttggaccctcgggcatgctgtccaccttgagtttatagctgagatgaaggattggctcagggattgtctcaggttttgctcgcaaaaacgtcaatgacttactcatacaccgcctcccgcagattctgcactcccgaaataacatccgcggccctgtctgcaatcagcttggcttctcttccgtgaagtaagaccgaaaccagctgaaggaccatcttgtattcgcctgtacaaatagagacttagcaccggcaggcttccaacgagcatcgacaactgacctcgcttgtaaatggtctcctcggaaatgtcgtcaaggctcaagctcgatgtcatttgcatatcaccatggtcttgttccaaagccatctgaagaggatcgtccgctctctcaacggacgcgataatggaactgacaatcatcccagtagtggtacgacctgtaagacaaagagtcaggtttcatcctgcatgacgctgcttccatccgttcgaattacctcggcccatttgacaattgaacctgttcacaaagaaacaatagttagataagcatcgattagaacgacgcggcgttgagacttacacgaaatcggtatctctctccttcagatgggtctgtgtggcgccgatgagtagggcgaacacggctggaataggacttcgttcgtccgtcacgcagtatcgctggtattcgacgttatagccttcttcctgtacttgttcgtaaagttctcgaggtgtcatcacctcgtgatcttgtaccgtctcgtaaatgggtacgacttcgaacgatcccggcgtggtttcgatctcatcgtgaagcaggattcttccggtctcagcgatctcagcgagcacatcttgtttgaattgcttctcctgtccttccaccacagtgttctctacgccctgagcttcgatgttggtgatgggcttatccgcgagccgcagaacgtatggaatccccgcgacgtaaagtactggttcctcccgtagcgaagtccagacgacgtgtcgagcccctccaggctgagcttccatccgagtcaacgctttcctgagaccagcggcagttggcataccggttccatagagtcggcgtttgctaggtgcttggccaggggcgggaatcaagagcggaacctcgcggaagtttgccgcgccatcgacacgctccggcaaactctgcttctgcaaacccaagaagaggtctgatttgatgatggttccgctcgataaaatagagccgtgtctactcagcacgaagcgctcagcctcgtctaaagaagcgggaccgtcgagtgtgtcaagtgttgggatcggcatcaagatctcaagggtaccatgctggatctcctcgtcaaaagtggcgaatacgggttgagcggctgtccattgttggaaagttaccttttccgtggcagcgtcgatgtccacctcagccaaataggcttggaactgcagcatctccaggtaaatcttaagggctgtcttgcactgcttcgtaaaagatttcttggccttctcattgtctgcagcgtcggcttgtttgtataagtcttcaatgacttcgcgcagattatacgcttctccgcattgatcaatcacgtcatctacttcgcgcttgacctcgagaccactatgtctcaaacatctgagacagctgttgacaatttgccagctactcctgctgttaggttgcggccggagtttaggtgttcgagttggcatcgatgcgcccatctccctggtgcgcttgatccatcgcatgatcaaattcatgatcacactgatgaccgtagagcggcctcgaccgagctggtcgttgaggatgacggcagtgtccttctccagatctcctctgaggcatattgtgatcaacgactgtatgtcatcgaactcgatgacagatcgcgacgtgattgggagtcggatgtattgcaactccacatcatctgtttgttgtcgtgcgacgtccataacttgacgaagagtttgcacttcctttggtcggacatcttcccaagctggacgcacatagccgtcttccgactcttcgtggaggagcagcttgccgtcaaatgttcttagctctgcgatgacgtcggaggctagtcgctcgtcaaagatctctaggcggctaggagataccccggagtaatctttcaggtttctcagactcatagtttcttttcgtagacaatatgggtctgagttgatcatgacaatcggttcctcccggagattgatccagaggatcttcttcacgtggaccaggacagcccggactcgctccagaatcgggcgaacagaatccgcgtgagatgatcccagagcgaataaattggtcgacgggatatgccggaaaccaacagcccccgagatgtgctcgctcgaaatggccgcatcggtctgccactggtctgatttgagcagcgttcctgctcgaaggatgattccgcttcggttggcgattgtatactgggaccattcgtcgccaagcacccgattctcgtactggtccacctcaccctttggtttgctgtccttgctcttgacgtcgagaaggttttggtgcggcaatactactctcgagagtagtgacagatcgttgataggactaaacacaaaaagacggctgccaccgcgtcttcgcagagctctgatatggttccaaatctcaggcctatccagaagccattcggaaaatttccgaccggacgctcccgcgtcttcttcttcgatatagctagcaaaagctatcaagaagaaatatcgctcgagctgcaacaacccgcaaggctttaggggcagtcaagaacagttctgacccaccgcggcttaccgcttgcaccgcgcgatcgagccagactacccttgtcttttcatccaccccggaaatggaatattgcaacctggcctctagaatgacttcccgaaggttgatgacttggtcacagttctcgatcagggtgtccaccaggttctttcgctcccgcccttgatcgatggacgaaagaagagacaagatgacctggtagtttcccatgtaagcatttctcagcgattcgaggagtgtcggatgggtgactagcaaatctgtcgccgtggctgcagtctttgcgtcggatactgaattgccaacgcgaatttagtacgcttctactcgtgggctgatattcgaaggttgcaacctaccgttcgccaagctcttgctgatcaaccgtgtcaatttgagcagcgttgcgctctgagcttgactctgcgcagcttgcttgaagaattggttggcctgcaagccaggaacaggggtagagatgccggaaccgtgccgcgagaacggctcgtccaagtctcgcgacatgtactgctttctcctgacaatgagagctgcgatcatcgcataagtcgctcgagtcgccccgagaccgtcgttgaagaccaagcacgtgttgagaggatcgatttcttgaagcacagagacgtatgcatcgaggtaattatcctgcgagaccggaaaggtaagcggtctcggccggccatgctcctcgtctccaccatgcctttacgtacctcgatcggtctatcagccgaaatgggggttcggtagtatagcacggtccaaccctcatcttgcaatcgattgaaggattctttgagtgtgtatacgcttccagcatcgaccgatgtccaggttggaatcaagtcgccattctccaattcatcatgggtcagaatcagaccgccgttcctgttggcagcgaggagaaatcgttgaggttcaacgcgaaggcgagggacagatctgcatgctatgctcactttctcgactctcgcagaatatcttccttcagcttgagctcgatctgttcgagattctcagctcgatccgacagggtcaaggtcgtctttgcagcggcccagtcacggaggacaaaaggcttggtattgatcaggactatcagaaacatcaggtttgagtgtaggcggcatcagaaggctttcgtctgccagggcttactgatgggctcttctcgaagacacaaccagaccgcggaactaggctttcgtggtcgttccgtcggatccatcgaccctctacgatcccccaacgagccattgaggttgctatctcgccgcccgagctccggggcttcttctggccgacatccgaggagagacaagacggacttgactccagaaagtgtgggttgagcgactccgtacacgttgagggattcttcacggggagatcgccagttgggagcgtcggcgaggtgaaagtcaaggtcgagcgctcggcctgcaggggaggaacgcctcagcacagaggatgatcgaaagtgagttacaatccgacttaccggtaggataatggtctgatccggacgaggtctcaacgtcagaacttttatttcagccgaccggattagatttgcgagacttacctgtcttgagaataaagctgcgaagcagttcgatcaaaggataatcaatatcgaattctcagcaagcttgtcccgatcaagcctgattgctcaccctctcgccaaaactgctccatcccgacgtttcacgatccctccctcgttctttttcagtttctccttgaaccctactggtttttgtttcctgggggcaccaatcttgccagagacggcttccaacaacgaattgtgcggaggtcgacccgaggagagttccctttgaaggggaggactgacgagtccctgcatcaaactgttccgcccggtattgaaaccgttctttcctccggacacgacgcggttggtaggttgagagatgttgggccgggttgagccggtgtgggattgtctgcgactgttggccgatgcattcggctcgagtggctcgatggggtcattcctggttaaaggcacagttgacttcgtcgcatcgtttcgaagggcgccattagggcggtttgcggaggaactggttgatgctggatggtttgcgatgtgatcgaggtcgaatccggatagcttgtccatggtcacgatatcgaaagagtccgcaggatgtgaaacctgttgtctattatatggtagcaagacacctgcaggggcaactctattggacccagagatccgagtatatataggggacctgatagtattaccccaatatccgaaactatagctatcgagcttctcgaattgaaaatgactgagaggaaacgtcgactgagaaggatgttagcaagtggttctcgcaagcacgttgtgaagaggaggggtgggggtggtgggcatgtcaacttcaattttgtttccgtctcgatctccgagatgaccggggcatgacgaattacttccgacacgtgagaagcctgtatccctcaaaaacgcatcatacaaacgagatcaacggaatgaactaggagattgcgtattttatgcgatttcaagtttctatcaagctcacaaagtgatcgatggatggaaagttgagcgatccctgactcatacaaacagatcgggagggtcctcaagaatcacttcatatcccagctctagctcaacccattttcaattgacaatcctcctcaactcgaattcactatgatgcaatcatttcaacgtcagattggacgcacggcgggtagatcgctccctctagctggacggaacgcaagctcgaccatctcgcgccgatgcatctctcaacagaccggatcaggcgctcgtgatcgagcagcagtaggggttagtccgactgaccagtttagcggtacatctcagcttgcccattctagaacttaacgagatgtacattcgatcgatgatagccttttacctggcgggcggcggcgctgttcacggtcaccggcgtcggtctctacttttactttgagagcgaaaaggcaaaagtccaggaacgcaagagtgagtcctctcaatcccgccaaaattctccgagaaaaactccccttgatcttgttactgatgttgcggttgtgatgctagggcaagagaccatgaccaagtcggttggcaagccaaacatcggaggacccttcaacctggtcacccaggatggaaagccttttacgcatgaggacctgcttgggaaatggagcttgatctatttcggatttaccaactgtcccgacgtaagtcgagcctctgtttcaaaaggatggaggcgggagctgatgtcggcatgctccatggatagatttgcccagagatgctcgactcgctgagcgaggtcactgtcaacactggtaagcagcgacttacgtcacgaagtccagatcaagcgctgaccaattgtctttctgggttgtagacaagttgctcggaaaggagttcatccaacccgtctttgtatcatgtgaccctgctcgggacacggtcgctcaagtcaagcgatacgtatcaggtgagtctgccccgccatacatggtagatcaatccgtcttgagtcgctcatactcatcacccttttgcacattcggcagaattccatcctcggatgatcggactaacgggtccgttcgaggccgtcaagcaggcgtgcaagtcgtaccgtgtctacttttccacgccacctgatgccaagccgaccgaggattacctcgtggatcacaggtgagcgtcgacgtcttccgagctcacctcggccgttctaccctcgtcgctgaccaacaccgtccctgcgcatacagcatcttcttctacctgatggactcggacggacagtttgtcgatgcgtttggtaagaactcgacatcaccagagatcactgccaaagtcatggaacacgtggacaagtggaaggccgccggtcgtgccatctaaacccctctgacaggggacgtcagagagaccgctgcttctttcatgttgacacggttcgtccgtccgcatcacaactcattttctccccgaaaggcttgtacacatgtagattgtaaatagaagaatcgacgccaagaaagcattcgggaccttttcagagtctgatgaatgataatttgctctaaaggatattttggcgtcaggaatgctcatgagaaccattcatgtcttctggtcgatccgcccaacaatacaaaatgataccgcgcgctctagccggtatgcctatcatgttagccctgcctcttgaaaagtccagattggtacgaaagctccgattctactcgaactcgaactgccatctttgcaccattcagcgactaggcccttcgattccaggacgatatacatgatgttttacggattcaaaatcggcgtcacataggacgccgcctacaggcctctcaaatggggatttccccctgaattggccactgtcgatcagaaagtatatttcaagcaatatctgcaccctacgtgctcgactattcgtccgatgggtatggcgaatcggctgggaagtgtgttatatgctagtcatgccgtgacgtggatgatgtgtcgtcgtaaaaatacaaggtatacacctgtcaatgacaaggctcgttgcttctaattcccgaactcagaccgggcatcttctatcgcgccgtgtcgtgcgtcaggacgatcatttctcgtctactttcgtcgtcaaagtctcgctcgactccacctctatcactttctcctgtagtgtcaatgctgtggtcaacatcacgtccagcacgtttctcttgttctcttcgtccgccgagttataggtggattccagccagtggcccaactttgcatccagctcttcgaggggtgttcgaagaaccagcctgatccagcggaaccgaatgtcagctacgaaaccccatcgtgaggacacgctttaactgggtacaaaagactcacaatccacgttcaccgagtatcagacgcttctcttcgaccgcgagctcttccaccggcaaggatctccggagatcgttatcgtcgatcacgatatcactgcgggggacacacgtcagtgagtctgtgagatcggctagatggtccttctgctccgcgactcacgaaattcgtcttgtcagccgccgttgcagccaaaacatgggtgcgaccgtcccaagatccagcgccttgcatagccccttgaccacctctgggctaagcccagcgagtaccggtaatccccctcttgatcgggcgacagatgattccgcaccgacatcctcctctcgtacccgtctcagctctttgcccacttcaagcagagcttccctcctcttgacctcttccgccgatttgattcgcaagaattgtgaaggcaagatcgtagtgctcggcaatagccagggggtgtagaggaccatgaggggcaggatctcttccagggtcatgaggaaaaagacaaacggaacgattttccacaagtccgcctgggtgcgggagacgaatctcttttctcgtcttgtcaattcccatccttcccgtctgacccccttttgcagcgttcgcatgtgagagtaatttgctctcaggcatttacaccctgcccagtaaaacttgaagagctgttttgtacgccagtaaaacaccctccatccaaagtacgacttcttgtcgtagacctcctgcggtactgggacgacgtgggcggatttctcggcagagaggaaatcggcgatggcttcccggatgaccgaggtggcgatgggtgggtaagggggtactgacaggttgaggggagatggtgcgacgaaggggacttgtgagaaagggatggtcggtctgatgagacctttcgttccgtccgggttggtgacagtctcggaggcctctgttggtgttattgtcggcgtgggtgttgcagttacagcctcttcctgaccctgcgtcgcaggaaccgcctgattaggctcgacttcccccggtatccgcccttcggagctgttagcagcaggccgaatctcgagcggttcgtcctcctctcttcgtttgagattcgtctgccccgtcgccaggcctctccatacgaggccgtactgcagtccagctcgtctcgatcgacctgctgcagacgacaggcgaaagccttgttgcgagacagagccaaggctattcgtagtcgacaaaagggaaatggaagaaaccgtcgtagagaacgcaggatttgaaccgaagcgtaatggccgtatcgtcctcatcgggcgggagaccatcaacatccctgccgatctcgttgtcgtcatcgattcgccgtgtcgatctagtctgatcttttggtgagcggatcgtagatttggagggtttctagtggtttcgaatcgggtatcaagtagctggcagccctgatgatgcacttcgaagctgaattgtggtggctctaggtgggtgtcattggtatatgttattatgacaatgtcttacatgccagagctcatttcatcgaatttcatcatcgtcccggcacacgaaccctcttgatcttcccaacttttgtggggagcggcgcggccgatctctcgcgagaatcacgtaatgcggtgacgtaaatgcatcacgtaaaggctattgccgctgttctcatctctatgttatataccgtagggaaagctttgtcgtagcgtagccactcggagacattatatgactcgagccttcatcccggcaaccccgtcttcttcctccggcatgatgatagtagtatcactagtcgcgaattgccgtccggcaatgagaggtccgccctttactgtacctcgaagaattcaggatcgatcccgctggcgtctgagctactactatttcttgcccttttcctcgttgcagctttctccttcctgcctgcggactcgaggcgagatgtacacaagatgcaggtctctggatcactccaactcagattacctggacaaatgacaataaaatgtcgggctccactgtttccagctcgactcgatccagaagtggtgaggccaatgttcatcttcagatgcagactctgctaacatcgccgaaagtcatgtaaacataacgattcggtttcgttgctgcaccccttccatgtggcgtcggtaagaaattggcatatgtcgaaaatcccacccgaatgggaccgcaaggccgagtgcgaaaattattgtcggcttccgctactcaccggccgcacggaagcgcagcaagtacactgcctggatgaccagtgccggactgttcttcaacagcgagattgttggccccgagcgcacccacctagtgtcccaagagcctgtcgagggaggcgcaggtagttctcaggcagtcccaaaacacaaagcgacttggcgcgttactcgtgccaggagtgcgaacgccaaactagcaatgcccggtatgaaacatctcgactgtcctgacgatacatcgacgtcatgccgggagtctcttctaatcgaccaaggttgaagattgagaagcacgtccggcatgcagtatgcggacccaacatggtgttccggcgtattcactgaaacaagatcccctgccacccgcccccggtgagcgtcatttgcttccgaaattcggctggttattcttccgggccgaggttcaagatcaagcagctagaccgtaccggcttggaggtgctgggaacctgttgcctatacccaaagacttgacggctggcccagacattagagaggaaccagactgaaacgtaatgatcggctccttgcggtgaaacggaatcggcgtcttcgaaatgaattccggtcgacccggcgggccgctcgtccacgcggtcacggcctcggccgaggattgatacgaatcgtcagatcaatcttttatacactcgtctcaacctttccctgggtcatttcaaaactagacctggccgataacccgagggaattcctcgatcactcatacctgagcacggagattggtcgaggtctcgagtacactgatgcctcgccgtcggggtaccaaccgcggacaagactagcacttttggattcgggatcacggatcacgggtcgaacatagaacacgtttcgacttggctcggcagccgcgaccgagctttgccacaaggtgggacactcttgattgcgtccgagaaactcgccggatgatggccgtggactctgggcttcctttgactcttttgaccgaaacccagcgagaactccgccgccaagcagcaaccaggggggatcaaggagcaggagagtgatcctggagagatgtggcctaccttgcgccggtcaactcgcagcgatcactccgctgacgtcgttgatcaagatcaagagcgatcatgtggggagatgacctcagctttttgatctcgatccatccgttcgaccggcgctcatcggttcgaatggtctcttggtaacgagaggcacagcatcgacatcggatcagcgtagacgccggtgatgatggtgatgataaagactaaagggatcgacatattattacgcctcgaaacaaaaggacgataacaagatcacgatccagcttagcttctttcacactcgcttcaccttctgcctggatcacctgacattgtcgccctgctatctgctggctttattctgtcaacaaccaaagttcctttcgtctctcggcacattccactctcttttcttgcaacaaagacgatcgtatcgctcttgtcgccataccacctagaataccccgtcatcataatatcggctactgaggatcacgacgccaacggatcttgccgtgtactttcccgtcaaactctcaaattatcgggtctgattccgagctgtttgtggcaagttcgtctccgataactgacactagtcaggtgccgtgaacaccataggcattcagctgatctattctactgcccttaccctttgacagaacggggacagcagcgcagcagcagtgcacccatcgacggacagtgtcatccaaggatcatcgagctgatctcctcgtcaatctcgaacctccatcctggtctttcctcgtcagagatcgaataacagactcgaactcatctctttcgaaggattcaataccgccagccgattaccgaagcattcctaccggctactttacttcgtccagcaatcttgcctatctcgaacggtcatcctgatcgacatcgaccttgctgttccagcaccgtcttcagcgaggcgtgcagatcgagagtcccgactctatcagcagggagaatcgtcctcgaagaagcaacgtggcttgcaggatcagtcgagcctcgccttcaacgtgtttcccggctcaccggatcagatcgacagcgtaggagcgtgaaagaagacggcgatcgggcaaccgatagcctagtcaacacggggacggccttgtcgaagtgtggcgaaagtttagaacatcctgcctgaaatcgtataaagagcggccatgcagatcgagggtttggcactggcgtgaggtgagtagacctgtatatgctgcgggattgacatttactgaagaggactcataccagactacacagcctggtgcaaaggacatacctaaccgattgacatcgataattcggaaggcaatcccgctcgatgccttcctcgttcttccaccacactccgagtctgactatggagaagctgcggggacctgatgagattcatcctactccctcttctcctcgacaaccccacggcgttcacttttcaggcaagacgctcagatccctcttcactaccaagcggtccgacagtgctcgatccccttcggtgaccacgtcctcgatatcctctgaaaatggcactgttcgtagcggcgcggtcgatggcaaggtcgcgacgcacggacgggtgaaggacaaggtgatgaacatggggacgagcaggaggaggtcggacatgtcggggaccagcaaggccggcgatcgtcaggagatggtcgctccgtctggaagtcggttgacgcagggaacgatcgcttcgagatcccgggctgctcaatcgatgccacctccgccgaccgcctcgcatccagtccggaatcaggggactatcaagtttccaggtggagacaggggcccggtcgagcgagtgatgtcgcctgcctctaccgaagacagcgatctcaagtcgcccactttgccggtggtcccgcagaccacccggaagaagaaacactcgctctcgctcttcctgagctctagtaaagccagagctagcctctcaagcacaggatcaatctccgctactgagacctcgaaacggtccgctactgcagagatctctagaccgaaaggaacggtcaaagccagggtgataagtaacccggtttcaggggctgcgtactcagacaagacaaacgccgaaatcaaacggtcgcagacgacaactacggtcaggaaagcgatctttggtagaggatcaatcgtgcaaaatgagcatgacgtgtcaggggccgccaaacaggtctcatctagggcccacctggaccaggcaacacccaaaacgcacgcagaaacagatcctagtacgacaaagaaggcgcagacccgttcatcgcgggcggtgtctcccatcaaggttcctgatcaagcgatccaagaaacgcaggagtcgagattcagccggggaaagggaaacacggcagaggcaatatcccccggcatcaccgcaagtcaaatcgggttgacgatgaggacgcgagttcagtcaccgaatgcccctcccgagcgaacatcagcgttaggtatcccggcaacgcctgcaagcgggcaagaaggggaacattttgtcctcaggctcgctgtgacttacctcaccaagacaatccttccggagttgagatccagccgacgcgaatcaaataacaagcccgctggggcaaatgcgggcctaaatgtcagctccccacaggcttataggaaggatctcatcgagaaaatgcggcctctggaacgtatggaaagatcttggggaatcgactggatgctcaaaggccgagaagggttccaggtcagctcacgaacccgggagaaggaacgagatgcgttcagacaggccataggggatggatcgctactattattgtaagtcatgatgtgctgcaggccacatctgtctcgccgttactcaacctgctttttgatagcctcatcgatagaactacgatcgatacgatccgtacagcaaagctgcgcctcgaggctatcgtagctggctgtcgatccttgccattgtcattggatggcgatggcgacttggaagctgtcgtcgacatggaaggcgtgcaggtctatactgctgcggctctggttgtggcactggcgaggttcgctggacctgcagggaagcaaaatggttctggtgacgatgacgacgacgtgcggagccgttcgccgtcgcctgttcaacaacgcaccgccttgacagaaactgacagagagcgtaagcgccggccagaaccggttgcaatcgtcaaagtctatggtgaatcgcctgaaaggtcctcgtcgagcttgcaaagacggcaatctccccagccgcaacgaatggccatacgcttgccggctgggaattactacgcatccaatgccatgcattcgaaactagataccgtcttgtctatgacaccgggagaggacggattcactccagctccggcggcttcggacgctttcgagggctacttcgcaaagacacacacggagaagcggcctgtatcgccttcaaagccgatactcaaaccgtacctgacgacaagcgaggaagaattcacgagtgcatcgctcaccgaatcatccgtacccttccggttccatagtcgcgacccgacgcccagtctcatcagcggaacgactgatcgaacgagtatggcattgagtgaccttcctgagagggctcctcgatcgatcagtttcgcctctcatgacgacgacacaaagaggcagataaaaaacgcggtcctaggtcacacagacactgtctactctgtcaatgatcgacagacttcgtctgacgattcggcggttccaatgacaccagtgtctgtatctgctgcccgattccggcctcgagtgcaacgtggcattactgttgcgagcagcatctccagtatagacggtaacgaccggaccccgtccaggaggaacagcgagatcaaacccggacgacctcaatatataccacgccgccacacgactcaagccccatcttcgggaactcctgcacggcaaggtgaaccacagggcggcagaatacctagcgtaactcggatcgcgagtggatctcaaagccaggcttattcccccccggcgactcctcgtcgcgctatgtcgccgagtttttccgaaagcccttttatgccatccagtcgcagaacttccttcacatccgccacaagccagagtcccgctggacggcactcgctcaagccgttggtcatcgtgaaggatattgaaggcagatcgcaaacatacgtgagagtccacctttcgctacgttttcccaggatttctgctgacatagcgccccttgactagcaactcggcaactgcatcggcaagggccagtttggtatcgtctaccgagcgctcaatcttgtgaatgggcaattcgtggcagtcaaacggatcattctggaaaacctagacgacgatattgagcagatcatgaaagaagtggaagtcctcaagcgtctgaagcatcccagtatcgttcgttatctgggaatgacacgcgatgagaggtatttggatatcatcctcgagtgagttccaatcctagatcttcttcgcttcggccatgtcagactcacgctcgaatcgacaggtatgttgaggggggatcgttagcaaatgcttcgcgatcgttcggaaaattcagtgaacaccttattgcttgctatgccgcgaaaatgctggaagggcttcattacctacacggtgaagatgtaagtccttattgggctaaagttcccagtttcgcgagtttattccctctcctcactcctgcctacaggttgtacattgtgaccttaaagctgccaacatcctcatcaccaagaaggcagacgttcgcttgacggacttcggtgtctcgctcaatcttcgtgcggttgagaatcagaaagacgacaacgttgtcggtactcctaactggggtaagctctgaggcacgggatgattgagcgaattcgaggagctgatcggtgttctcaacagtcgcgcccgagatcatttctttacagggcgcttcgacggcatcggacatctggtctctaggatgcaccatagttgagctgcttgaaggaaagcccccttgggcagagctggattcgaacatggctgtgcttttcaagatcgttgaagaagaatggcctatccccgcttactactctccggagctcaaggacttccttggtttgtgcttcaaaaagaacccttcggatcggccgacagccgagacccttttcgatcacgagtggattcgtaacgaaataggaatcgatccggtcagtcaattcacattccggtatcatatccgtctagctggctcacgtttgacctcgtgttcagcgtctccgcaaccacgatagtatacctttccttcggcgcatctctggagatgccgtgaggttgcaacaactcaaattcgatgcgggacctcccggactcttctctcattcacgagacctatcatcgcctgtagacgccagctttcgcaactggaaacttgacaagcagcgccctggcctttccgactacgcgtattcatcccctttacgaccagatctgcgctccaatccggggtcctcgttctcggtcaggagtgacgataccgatcctggccaggctcgaccggccgagctgatcgaggcggagcgtcaacgagctcttagcaaacttacgaatggaaatcgaggtcctctcgtgaactgtccttccgcgacccccgtcctccaagttcactatcctactcgagctaaagaacggcttgaacgtctgcgggaaagtgacgggcggcgaggcagtgcggagaccgattcgactaccaaggcgcatcgtcgctccgcgattcatgattccgatgcgactactgccgaccgattggacacaaggcaggattctgccaaggaacgtcatgggagttacgcagtagacgaggcgcgtctcaacaaggcgaccaagcctattgcgcgggaagatcaagctactatacgacctggcgcgtccgggtcacgggacgttgcttcattcacgtcaacttcttcaggcagatatccgggcggctcagtatccaggttagatcagggcgagatggcagaggataggaccaacgcaaaaggcgattgcacagtacaataatatacattcatcacgcatacacgaggtgaacccagtgatggtgccttcaatactcattgtatcctcatttgctgtatctatcgattaggaatgctggcaccttattattaggacgtctcaacttggggagcaacggtggtggtaatgatcgtgatgcatcgaagataaggcatacaaagtgatgtggtagatcgggagaatatattatgcgaccaggcaattactgcatgactatgggtgaaagcgaaggagaaacgacagaatatggtggtctacgtgtgatcccggaatgagatgaatcccaaaagagagtggtcgtgaaagtcgcgcgtcgcagagggtgaacggggtagaggcaggtcggctctatgtcgaagttgctctttgcgatttgccaaagaaactcttgaatcgcgtcttttcctgaccgttggaaggttgtctgaacttggaagtgatgatggcccaactggattgtgtggccgcctggttctggtagaacgacttgttggggctgatgaactcgctcttcctgaaaggcagttccaaatcgttgcgtgggggagagtgcgggtaaaaaacgctcgcgacgtcgagctcgaacgtcttttccttggcgaagaagggcgagccccgaggagagtgcgcagcagtgagaggagtgacaggcatggatccggattcggacacaggggaagccaatgtcgagacgctggagcataagctggctctggacgagtcgccgtccagtagcgagctcgcgctggacccggtgctttgtcctgaaggtgtccgactgtgctgctgcgagtcgagttttggcgtgtgtaccgcttcgctgttcatgaccggggtggcgggcaatgatcctgcacgctcagggatgacgggagatgaagccgtcgtctcgtgggtggtctccggtacgacccctgcgatcacctcgacgtaagagggcacggccttgcggggcaatttcctgatcgagctggagctcgacgcgacgggggtgcggacggtcgaaggtccagcttggttgacggcctgtgtgtacatggcctgagtcgattgacgcagagccataagctcggccaagttggaaggtccaagcacggtttgcacttccggtcgggtcgtgtaggacgagatcaagttctcgtaagagtcctggaagctgacaaactcgtcgtccgagctgtcatcatcctcttcacaagaagcggtggtcaaggtctcgaccgtgtcttcttgaacagaggaagatgcgagggcgatagcagcctggctgagcgggaccggctcaaagtaagtggccgagggacctttgccgaccttgaaaagtcgggaggcgggctgagtcttcaggcccttcctcgcggcgaatcggtacgaagcgggaatgggcgccgtcctctcgacggctcctcccatgttgatgcccaacccgatgggagcgctcggcctcgtaggggatggtgtcgagggaatcgctctcccgaagccgggaaagttgggggtcgaagcgttcttcatgttgaagaaagattttttctccgagagcttgcctgagcgctgggctgaagggctgggagtctgggggcatgagattgaaggagaagacgaggcggtcgaggtgggagagatgccaacggatttggtggcgtcgaacgaggatcgacggagtcgttcgtcccggcggttcttttggttggaaaacccaaagacaacgtctattggtccacgagcctgagaatcagcgccaaattcggcaaggtttagaggtaagtcgttggaccgaccttgggaagggtagccggaagccatggcttgcttggtaggggtgacgggaagggagttcatactgatgaagcgaggagatgggacactgaagtcgaatgagagatggcgcgtggatggaaggaggtgtccgagagtgtcgttgagagaggagatgaggagaggaaggataaagattgggactaggactaggatggtggttgccaatgccaaggtgaggaggattgctggagagttggtaggcgaatagcgggtcacgactgaagagttgaaagaattccgcttgcctatctatatgttcacttggacgcgatggttactagagttcggcttttcattcaggctcgacctcctatatgaccgtccggtgatcggtcggggtatataccaatgaagagagtcatccacctcctatcaccggcacggacgcgtttgaggtctgaaaagtagcgaaagacgactgagctttcaattaccacccgccggtgaaacagcatcttgacccgcattcacgagcatcgtcaccggtccagcacgagtgactgggaccgggaatgaggttcgcgaggcagcttatggcaaagcgatggcccagtgactcttattttcctcacatctcccgtgcggattgagaccctacgacttcggcttttggcgcgcgggaagaatagcggtacgggtgaaaatgtcgatcaaatgatggaaacccgcttagggagagagcgagaagggcagaggggggcaggagagacaacagaagatcgctagctcgggaatttactccgaagcggcagaacgagagatctgagacaagtccggttgctcctcgttcagtcagtggccgtcggccctgccgctgccattcatgctgctcgtgcttcgatgtgtctcgcgcgcgcgcgtcaccccctgtgtgctgactcgctctctctgccttcggtgcgtgatgcgtcgcttagattttccgggaagcgggcgatcagggcaggcgcaactcgcgcagcccggtcggcgcaagccgagaacttgaaattgttcccgcgtaatttcgagcgggcggttcaccaggctcacgactcatcatgcaccgtgaaagatgcgaagaaacgacggtggcagtcacgtttttgtttgtctcgcttccgcccatggccgatgcggagtttcttcgaaatgatcgggacggcgactatcttgccctctgcgcgctgacccttcgttcccccgcacacccttgtgaacgggaaataatcacccggaccaagggctcttttcatttatgactcttggctcctatagacgccgaggcgcgtctcattctagtttgtacaaagaagaaaggaacctggtcgcgtccgttcgtctcggtccctcaccctcccggcgatcgtcgcgtccgtcggtggacagaggacaggacgatgccgagacggtatgagagtgacaaacgcttggctgtgtcttttggttgaacacggaaaatttccgaccttcgggggcggtcctcgatcgcacatctggtgtctaccatgatgcgttcctcgtccggtgagcttccccggcgtcggcgtgaaccgatcacacttcttccttgtctcgtcgtctctgtatggatacactgatgttggaccagtctcgtatagtcatcttctgggtcgtctttttgattcgtcaagccatctctctgcgtcttcccgctacccctctcgcgcgtcgtcatcaaggtcaggaccaatacggggctactcgttcaagaggaaacgccacaaagcctcgggatccttgtagtcgtggtgaatcagggagaccaaccaagactcgtcactgatctgttgcaacagctggcgagaggctgaacgaagcgggtagagccgggaccattcggtccagatctcaaaggcttcctcctgctcggtcggaagcgcaagaaaatggcgtcgcacgactatcagcatccagagaactttaaaatacgagaagggaagtcgcgcctagaatttaccttccatgccaaaaatgagatctcctcgatgatcgtcgactgaacaatctcctgtccagggaacacggcccacgtcaccgcgttcattcccggagccggcacgttggtgataaagtcgccctgcagttgacaaggtgatttatcatacagtcagttagcgaccccgcctgccatagttgagacgcttgggaatctgcggtaacacttgcctttttgttgccggcatagcaacttatcctcccgtgaggttccttggccaccctctcgtacaaccgttcggcctcttctttattctcgacaaagaattcgacaaaactcttttgaaagacgtatccacctttaggaccgaacccgtggatcgggtcttcactcttggcggcatcgacggccggttgggaaccaacagtccaccagcccttttcagccgagttgagcgagatgaggtggttcaaaatcgaagcggattcaggggaaatgggaagatcgcagaatggcgttgtgggagcagcaggatcgctgcgaaggtaccgggtgaagagggaagacaaagactccttgtctactggtgctccccattctctcaacgcttgggcaggctaagccatgccatcggtttgcttacacatcagccaagaatcgatgtcaaagccactagacgatcagtcgacttaccgtgatcttgataccgttaccccatccgtcgatctctccataggcaggacttcgaacgtcggtgaaacgaccgttagggaactcgtcccagctgtcttcttggtttgatgatggagctccgccagcgcctgtcccattctcattctgacctctgggtttcggtactagcccatcaacaccggaatctccgtgaggcgctccatccgcgctaggtccacctcgcttgtgcttcatgccatattcagcaaagtgagaggcgtctgagggtgagatgctcaaggcctgcagctgctgtgatggcgatgtagacgcatcggcggctccgtgcaggggcgccatggtgtgaccctgctcgatagcacggttgcgggcttgcgtcacatgttcgctcttgtgatcgagcgtccatcgcaggttctccaagatccgtcgaactgatttttccagattgagcgtgcagaaatggaccccgttgatcccgacgtcggccgagatgatcttgttgatcatgttcgtggagagctcgattccgtagcgtttgacagccgcgtcgtcggccttttcatggaaacgatgtcaacacccaggtgtcaacatgcttcgaccggcaactcaccttgatggaatccaggtcgttcaggacgtgctcgggaaccggacacttgcacaggttggtcagtcgcctaaacgaagcgtagttttggatgggcatgatccccgggatgatgggtacttcgatgcctgtgggtggagctgacgtcagccaacatcacattcgactgtccgcgatggcaaacgtacctgccgctcggaccttcttgacccattcgacgaatccgtcgacatcgtaaaacagttgagtgatgatgaaatgggccccagcatggaccttttgggccaagaagtggatgtccgattcgggcgtatccgagtcgacgtgcggggtagggtaacctgcaagagagataaaaactctagacgtgctgatacgggaatgtggtgttctttatggactgaccagctacgccaacacaaaaccatcctttccactcgcgatcgatataccgcacaagatcttctgcgaattcaaactcctgttcctcctcctccgcctcgagaccttccatatcctggccgtcaagtagagaagtatcaggaccaggagccgggcggtattcctcctttcttggcgggtctgcgtcgattagattcaaagcgtaagctagggcagagtcgattctagccatcgaccgaacacctacctcctcggagagccaatatgttttgtacgcccagctctttacatttctggacgaggaatgacgcagctcagtacgacagaggctgggcgcgacagtacatcagacgcttactttcagtgcttcgtcgaccatcttcttgcccatgttggtacaggtcagatggaggatgatctgcagtttgcctcgagcgagttccatcttggcgatttcggccgccagctccagactcctcgtcgccgtgcttccaccagctccccatgtcacacttacggccaccgggggtgacaagggagctgaagtcagtcgctggattcgatccagcaggttggcgagaccttctggggtacggggcgggaagaattcaaaggtatgataagactcgcccgaatgagcctgtatggcgtctgtcaatcgcatcatgatgcgtggtatcctgttttactatggttatcctctatctcactagagtgtgacttgagactgcctgtgctcaaagggatagcagatcgtattgaatggttcgactatcttgttgactcgatcggaggtcccgtcctctaggtgagcaatgctagatctcctacatcgcacatcgcgcgatgaggtttcgtcggcttgaatctcggttttcgggttcaaccagcccgcgtcaagcaagctagaagggagatttagaccccaaagtagatacctatcttcttgcttcttctccctgatctagccagcactgccagaccatccaactatagaccaacaccgtacgagggactacaagatcaccatgcctgccctcgaaaataccaacatgccaaagctcaagctggtggccaagggcaaggtcagagatatttacgctttgcccgatgaagccgactcggacaagctactgttcgtagctacggacagaatcagcgcattcgatatcatcatggaaaacgtaagcatctatgctcaagttatattcctcgtccgcctgaaaatgctgatgcgatggacatggaatagggtatccccaacaagggttcgctgttgaccactttgtcgctcttctggttcgacaagctgtccaagattctgcctcaccatgtgctcgcacccgctccttcaacatgctggaacgaggacggagaccagaccaaagcggacgcagcatggcagagtttccccaggagcctggacgaataccgagatcagttagagggaaggagcatgatcgtccgtaaatgcgaggtgatcaaggtcgaagccatcgtcagaggatacattacgggtcagtcagtttcaaccaggtcttcatcttgaattggagactcaatgcaatgacacacaggatctgcgtggaacgaatacaaaaagtctcagaccgtacacggaatcccgatgccggctgggttgaaggaatcagacaagtttccccaaccgatctttaccccctcgaccaaggccgaccagggcgagcacgacgagaacatccatcctgacaagggtgagactatatgctgtgtcacttatcattggcaattaggttgagctttacttgcaccaaccgatagtcaaggacatttgcggagaagagctcgctgccgcagtgagccgggtggccgttgagctctacagtgagtgacttcgtacccgttctggaattgggggaatgctcactccctcgaattgtccttcttatcgtctgcagctgaagctgccacccatgccgaggctcgaggcgtgattctggcagacaccaaattcgaattcggtttgctcccggccacctcggaatcgcaatccctctcatcccgactgatcctgatcgacgaggtccttacacccgactcttcgcgatactgggcggccgatacctacgcgaccggtcgaggtcaggattctttcgacaagcagtacgtccgggactggctcatcagcgaaaacaagaagaacgtcgagaacgtcaagctgcccgaggaggtcgtcaagaagacagaggaaaagtatagggaggccaaggagcgaatcatgggtcaggggaaatgggcatgaaacgagttgtaatacaaagtgatttccttccacaccaaacgtcacacatcgagatctttcatctgccaaaaggctggacgcagctaattagaggctaaaaggtcgaactttagctttgcccaaacccggaagcatatttcgaatttcgcatccgaacgagatatcctcaatccatcatctgtccggcagggttcaatctaggtaatgatgtcggtcttggctattttgctgatctagagcttgacaacgaatcgtaaccaagtcttccaattgggaaaggctagcgaacgaacatgcgataatggactggcccagttcgaccaccgatatcggtgtggtcgaaagacagaaccgacataaaggtcgtcaaaagaccctccgtatcgcccgatacgacaaatcggcaggtctggtcaaggaacaccgagaggtcaagggcaggaggccttacatcctagcaggaccgattcttgactacggagctgacggacctgctaccttggggaagaccactgtatcgatcgacagtaccaagaaaggcaaggaaaaggcaagatgggaatggaaatatgcaacagcagagaaggacgacgagcgtaagtccaaacagcctaaacacgattcgtcgtgtgcgtagtaccgaactgaactcattactgctgcaggctacaaataccgagccgggacatcctccaagtggtttccacctacctggaaatcccggtctgcagctaaccagctggtgagaatgacactgctagcaatgtcaacatggacgagaagaccgctgatccttgtcgatttaccctggggcattcatcaaggctcacgtagacgaaggtcaagtctcagctcgtgcaggtccggcggcgcaagccgctcgtaagcaagaactggtcgctgcggtcgccgaaatggaaggaatggcaggtctcgacagcggtctgctcgaaaccttattcgacgaaacccctatccaagccagtctgccgcaaaacgactcaggacaaggagctcacgaaactgttcaactgccggttggcgtcggtaaccgtctagcttacgagatcgaggggcctgtcaagaacgaggatccgcaagatatcggcaactcgagcaagctggcgatcttgacattcgccggccctcgtgcagaactcgacccagtctacttcttggcatttccctctggggaagaccggcgtaatctcagtaggtcatcatagcttgctaacagactcgcatcatgtttcggtgactgatgcgtcgtcatgctggaaacagacatatcgccattcagaaaagccagaaacagcaagggagtgaaagatcttgctttctgtccaacggccgcaccttgcatggtttttccatctccaatcctacagatttccgtttcaaatactctggcaggtcgaacaagtgcgtcaggctgttttcagtagtcagcctcagccatagccgattgcccatctacccatatgtgtacagacaaccggaacacagtctatctagcaatccgtctggatctgtttacatacatcatctcggtggatgtcgtcttggatttaccaaccttcaggtctagcactttgagaagccggctcttccctttagggatgtcacccatccaggtgcgagaggtagatcggatagacctatctaggacaagaggcgcccggcacatggacgtggccatgcatccgaccaagagaagagaatgcgtaatcatcgacgacaagggcaaactttggcgttggaggatagtcaccaatcgaacttttgccaacatcagtacttatggcaagatgtgagtaaattcgggcagtgccaatgacagaagttgacgaaatctactccccataactagctcaaagttggggaggtctagcgtcaaaagcaacgacagtttctatcgaatagcatggcatgagtgggagcggcatctgatcgtcataacggccaaaaccgtcgagatagttgacacagcagtgagtcgtttgaaattcgggtcgattacggccatgacgcgataattgatttggtgcatcatccagctgggcaccactcgtcgagtgatcgattttgtcaactcttccaccagaatcctcgatctatattcgaatctcgacctcgaccaagcgacgtatgctgcaatactcacaaccgaaaccattgtttggttcgacccagcacatgatgggcgaatcatgctatcgtggaagcattatttgcctgtatcagatggtctcagattaaaggtcttacccgccgcaaagcgtaagcttcgcattatctcgatggacggatatggcccgactcacacggtcctgtcatatctccatcagatatgacggtaggggtgctgtctctcaaacgcggcatattgacagcgtttcccgtggaagaggcaggatcgatcttgcgaatatcggtccagccttatgacctcatcgccacgaaccccctcgagggagacaaggctcttgacgatgcagttctgtatcatctgatccgagatacacagtccaagtggcaatttatatcagtgaatagcgccggcgaggttgctgcagcagaaatcttgggggcaggggatctggattatcgggcctctataccgatcgaggctcaatggtctggagcggtccgtaatctggatccggccccagacaacaaggaagtcggccatgtttttggggatctggagtctggcgcgataccgaccaaagagagagattttcaacggttctggaattgtgagaatcgcaacgcgctcattgcgctcgttctgaagctgaatcgatcacttgcgtgctccagctctggtctcgcgatcacagagtcggcgagatagactgctcaatatcgatgcaatgagacgcctggtgactgaccaggacgagctctacggcatgggcatgctgacagggtaagcggagcgtaaaattagatacgcatggacggctactgacttgtcttatcaggcttgacgtcgcagctctcgtcaacgacgatggtgagaacgaagtggaaactagcacctcctacctcagaggctacgacataggaggaattgagaggcctcaaaagctagcagaagaattgagccgctttgcgaagtcaaaattggcccgcaatatccagcaactgccaagatatctccatagtggtcaagcggtagccgacccattcattacgattgatacgactctgaatggtggtcgaacgcgagatcagagctacttgcgcacggcgttgcaacgcctcgcagtcgatcttcagctcagcgggatagcgattccgacagacgagagactatcggaaatacaacctattcaggaggataccgaacaccaaaatttctccgcagagaccgcgacgcaaacagatatgccagaattgacctgtcttgtccggaaatctgcacctcggaacagacacgagcaacatcaagaagatcctaacaaagtcgctaccgtacgagctctcttgtcacaatggacaatcggaaacgacccttcaggttacgcttggcctggtatcacctctcatgtcaacggcacccggaatctaactgaactgaaagaagcgctgcccgctccggaacgggtgcaccccatgaggcctgttctattcgaaacatccactcagccccacttcaacagcgagcaacgggagccgttaatgagtagtcaaagccagccggtcaacgagatcgcttcgacccaaatgctgccgggaccttttgctaaccggaacccaatctctttccgtcgtggaggagcaaagaagcgaactataggattctgatctcgtccctgaccggttgtgatttgagcccttttcgacactgtatcctgatatcctgcagtttggtaaaattcataatgggaagcgctttaagctcaggtcttgaccggtgccgtattctaagctgtgaaagcttcagcgacggtcgtccagaactggatggaatacacctcctcagataccagtcaacttgttcaggttaggattctcattatctgtatggcagctacttgatatggtcaaattgcgtggctaaaggtggatactactgttcctagataggtgtttataattttctcttataacgcttgccaagccagcttttcaaaagtgccgatcactaccttgccactttcaacgccgccgcagacctgatgacggttatcgcgagttgcgtccctggtgaatctatggtcaataaggtggtatcttcatatcatgtcagctacgcgcaagcgagattctagctcgcaaattgggccacaggtaaacaataggttagaagagcaggtggccccctgatcctcatcgaatgcctgacgtcgatttttcgactttctccccgcgctagcacgaagattcagaccacggaagggggtatcgatcacatgctcagtctttatctcaaaggacttcccattcaccttcgatcctctcgccttgctttagcattccggcctcgccctgttccgtctcgttccgaccgccgtaatgttgcccagagtcgtggcttggtcaatgggtgtatatcactttgtcccttcctcatctgcatgtgtaccttatcttgcttgcggtagtccgcaaaactttagcataaataggtgacctggttcggaatagcaaacgttacatggagtaatggaagatcagggcggtatacagcagtattgtaccgctgcccgaccagagggtggtgtgaaggtggaaccccggaaccatttgatctcagaccgacattccgctcggggcgctaccgctctattcctcaaagtagccagacacacgaatcttgacgtagatatggtttgttgacggttttgtcactatgcccccacaattttagcttttcaacatttgttagatgttcaagcacatactgtccatcgaaaccggcgacaagccggtcccttcccgcagtggacgcggatgaaacgcgcgagctgctcgcagcggccgcggctgcgcgtgcgtgattggccttaatcgtaaaagacgcaagacgcgacctcgccctggattttgagactgcctgcccccatagagtctccttaaatgtaaatatcgtcctgtccaacctggctttgacacgtgaacgtgcatgccgtctatctgcatcgacagagggcctttcaaatcaccgaaatctctgtttttacagggtctgcgagacccggcgaaggccgtccttgttagaaagccgatgacgatgacgaatgcttccgccaagcaactttttgtgcctacgaacgatttacccgagcgagtgtcgagggatgcaggcagtctttttggaccccttcatctctaggcagtgctgcgaaagtcgaatatgtcaggagccatcagcatcctcggatataccaagcacataactctcatatcattagatcgatttggttgtattgccggtatttttatcgataatcaaatagcgttcacctttcagggccaaatcgaagcagaagagcatcttgctaccgagcttgcttccgcggtttcgctctcgaccgaaataggggtagacatcaacttcctcaggccacggtcgatcagtccgaagacacaaccgctcgagcaagcccgtcgtggttcgaggggactcaggcatggaacaggcagatcgtcaacctcgaagatctgccctggctcatagctacggagaacagcgacccgtaccccagatcgaatcctactggtgggacttgacagatccgaccacgcaggctcaggatcagcctgaaagctctcgtacgggtgcacggccaacaccagcccccagagatgacggtcaaatgccaccgtcccatgaggagagtgaccaacgagatgttacgattcagagctcccgtcccagcgagagtgataaggagagcgacgaaagcgatttcgggggagctctaaacaaggaacaaagtgaaaagcgtcgcaaacgagatctgagacgcggatcatcccggatcgtcacggacgccatcaccttcaaaaagatccggatcaagaataccgacgccgatatcgatgaagcgtatgatccaaagagatctcgaggggcaagcacgctcactagagcatttcccccgatcgagtgggacaaggcgatcgatgggtttaggcgaaggctgttgcgatatgcagcgttaggattacttccggcattggtcctgccaggatggttcggattttggacagggactgtcctgaccctcgtctggtgcagcggtctggcctttcactttaatcgggtcggaacgtcggaatggctggatcacaagtgggacctggaacgtcggcgtgcccaaggtcatgtacgcgagcagcatcgatcaaagcatactacgggcaaaagcggatctaagcatgagtctcgcaaactagagaccgtcggtggagaagagactggagttcaagataagcgggaaagtgtcgaatggatgaatacgcttctcggagggttgtggccgatcatcgatccgaaacgtacgtccaggccacacggcatgcaattgatcgagcaccgcattctaaatcctgtcacaatggaattccagtattcgtatcggtcgtcgacctcttggaggatatcatgcaggcctccatcccatcattcattcagaccgtccgtattgcggatctctctcaagggaatcatcccattcgcatcatttcgatccggacgctgccagatgacgagaaaccgggtgacgaaagtgcgaaccatgcggatgcagccacggatccgaaagagcagaaaagcgcaggatcaggagacggcctttttgccgggttcaagcaggatacttccgatcctttcgttaggggcaagagccctggcccagggcaagggaaaccgcctgccgcgaagggagaagagagtcaacaggatcagacggaagaactgggcaagttcgtcaacctcgaagtcgctttcgcctaccgatccctaccggtccatgggaagaaagtgtattccaaggctaagaatgcacatctgatcatccaatttggtcttgggctgccaggaatctttggtggtgcctttcgtaagttcccgatggatacaagtcactcgtagcttcacttatatggcgctcgcattgctcactcgtagctgtatgggtccaattggctggatgtgttggtacaatgcggatcagagtggagctggtagcggagtaggttcatcacgatgacccggtcgaatctgactgacacccagcccatcaacaaaaggcctccctttgtcaagcatgcgacagtctccttcatgggtctaccaaaagtcgagatctcggccattccgatgttggacttgggcatcaagttgaatgccatgaatctgcccctgattagcactttcatcagcaacagcatcaatactgctatagacgaatacggcaagtctgcattcgttgcagggttcgatggttttacaaatgctcacgcgatacatcacgactaactagtcgcgcctaagagcttgactgtagacctggggcagctgctcgttggggatgacatcaaaaagggtcagtctagtcgaacgatcaatgaggtcattaacgctgaattctgcgtcccccctggcgccagatactcttgccctgggtgtaatcgtggtcaccatacacaaggctgtcgtcaaaggttccgacttgggtgggaagtcaggtaaatctccaagacaacatctatcgcctcgctagatttcctgatctggttctcgtaaacttcctagatccctatgttacagtctcatacgccaagtatagcaagccgctcttctcgaccaggatcattctaggcgagacggaaccgacatggagggcaacaacggcggtgttggttagagctgacgcattcaaagtcaaagagaggttggcattgcgtaagcatcggcgtagaagctggcgtcgatacacagcatataccagtactcatcccttgttcgaacagaaatctgggataggtacgtcttcctaagcaaagccgtccgatgggactcaattaacgttcatttggccaatacagtgatagaattagcagtgacgacgaactcggcagagtcgaggtcaatatattcggtgggttattcgatccggtcacttcgagcttctttgctgactgcgcatcagtgaatagacctgtacaggaaccgaggcaagatgacatatcatcaatccagcttgaagcacagcatacgcgagaagaaggagatacccggtgaaatccactacagtataggttacttcccaaaggttctcccgaaagaagatgccaacggacatagtccacaagatacggacttgccgaaagactttcaagaaaaagaagaaatgcaaggtgaacacccgaagactatggacaaggaagaggacaggattattgcaatgctgccaacggacgattatcccagcggtatcttgtcaatccgtaaatctcgcttatagaaacgaaagagtcatggcacgagtgactgactaaccccggctgcatgtagaggtgcacgaagccttcgatcttatccgacagtacataggaccgtcaaagggtggcgatcgaagcgagaagggtcgtttcagccatcctaaggggactgaagatgctacgcgagaggaaggagagtgagtccataaaacaccgaagccaagaggtgtctggtacaacacgctgaccaatgcggggtgatagtgaccttccgtcggcctactttcggatacgtgtcaacgatgagacgacgtatcaatcacgggtcaagccgatccaaagccagcctttcttccaagcgggacaggaacgattcatccgcgactggcgcactgctttggttcagatcatcgtgcgcgactcacgcgttcgagaatctgatccgatgttgggcatgctacacctgaacgtgggtcatagattgacgggatcatgaggcacaacactcacgtactgcgcgccatccatcagctgcgcgacgttttcgaaggtggttcacaagttaccaaaatttaccctctcgaggctggtattgggcatggtcggatcagggtatctctattgttcaggtaggtcgtttctcgcgacagtgtctaggttgacattgatgctcaggatggtactgtcaggcccttggatctccatctgcccagaagtctattgggttgggagatcgcttccgccgttatcaaaggctcgatctacgttgaagcgagctctgctcatcgatccaaactatcacacagttctatccatatacgcacctcacatggctcgcacgtcctccgccaccatgcccattcagatcgaggggatagcggcgagatcgaatggaagaatgagcgattgtctctgcctgtcaagaagcggttcgcgagcccgcttgtgatgtcgttcatgagcaacggtctagatctaaagggtggggtcgtcggtatgggagtattgtggatgatgacggtgcaggatagtgaaaggctgtcgatcaatctgcccagtaagctcatagcatttggccggagcaccgctgcagcccatcgaaccgatgcatctttcttgcagtctatgaagccaaagattacaacaggctggaacaaaacttctggacgtattgcgaagatttgaaggaagataccccagatgctaagcattacgcacacgatcccacggcgctaccggaccccgaatcctatggactaaaacgaatcggaaccgtgcggttcgagcttctggtactgcccgggatctcatctacgcatcgtcgggtattcaaaaaggagccgaggggccgaatcatcctcgagggtttcgacaacgccgtccgggctggattacgggaagatctagaatcccggtcgcaaatcgagaaggaggacgagaattatcccctaggcgagcgaaacgagtcggacgtgacccagaagagtcgagctcctgcagatcgtcgagaggcctcgaatattgacagagacgaggaggatatttcgggcgacgagactgacgctagcgctgcgacttattcggacgagatggtcgggcgatcgaattcagtcggatctaggcatccgagacgcatgacgagccattcgacaaacgggaccaccgattcgagaggattcagagaaaagtatcgcgattggaaagaagcacgggtgagtcacaggagttgatcatagcgcgacgatggtgcaacgatgctcaagagtcgcatctcgacagacggacctgcactctcgacaccggggtatggcccaggtcaaggcgtacagatcggtgaaatgggtcaaagattgtaaggcggtctataagtgcgatcctatcgcgatccactgtgctgatctagttcaccgtcgatcgtggcacagccgccaagtctggtctgatcaaggccaagtataaattcgaggtgagcggatgattcacacgtttcagaaccgttgccactcatgactgatgcgccgagcgatttccatagatgcacgagcgtaatccagacattgaatcagaggtgtagtagcaagccatcgaatgatgacgcaagagacgctcgatcgggagatttcgcctagtctatgtcgcggatgatggcgccgctctgaccatgatctcgtcatttcgacagtttataatcatgtagtacatcctagtctgtacgatgcatgtgcttcgtcttgtctatagttgtcaaaagtgcctggctgcttgagacgttgcttctgcttgaaacagggcgaattaatagaatgcgaatggtctaaacgagtggtgggggtgtgtcaggtggatgagttggtgattcgtggatccgagactttgcgcgaaccgtttatcccgattcgtctcgtcttgcgtgggcgagtgagtgttgtttgtttttgctccaaagcctcgctcgacaagcaaaacaatcgattctgctcgacaatgatatcctcaaacatccacttgatatcaaaggactcaagcacaacgtcacactcccaaagctacatcgcaacaagatcattaggaacggtctatggctcatggactgaccgccccccaggcagaataatcacccccgtcacctcgagctagcactggcaagcataggtccgacctgggtttgttgttgttgtgagtgcgattccgaccgcacgatcggtgacataccctcacgacctcgatcgacctgactctggttcactagctctatagaccgctgccagcaccccctcgtataatgtctggcacgggagtggcatacaaggtgtgcaagcgattcgcgataccgaatcgtcgtcggaggggatgcttattcataatacctcgactctggacctttttaccctttctccggacgatagttgaaaacgcccaccaaacggcagaataatcctagcattctacgtacccccatctttactccgaaaacccctttgaccttcacacctgcgtctgcggtacgcacgagcgcgagcatgggcacgaccaattccgaagacaggtcttctccgctcctcaccgtgacaaatggcaacaatgcgctcgaccccagtctcgacctcatgggaggaatcgattcggatacgattcaactgatggcagaacccgatgggcccaatttgaacgtgctgtcaccgtcggctatccagcaactcgcccttcaaactcctcatccgaccttggatgcgggcgaggacgggcaggacgccctgttgtttcagccggctatgctggacggggacgtgggaacggctcgagtgctagactttgacgacgcaaagggtgtcgacatgaaggaggacatggtggacactgcgttactcgacgagtttggcgaatctcaaggaacggacgtcggcgagtatggtcttggcgcggcgttcgacatatcgtccaccaacagcccaccaccgtcggatcttgtgtcgtggtatgttcttccgactatagcaatccgagaaccgacgaggctgagcgccgatcgttttgcaggcttcgtaacgtttacgatcacgtagcacctccttacgacgagttcacccccaaaatcttccgagaagatctgtacgcgcacatggctcgtgatctaccaccgtctgcaactttgccatcaaaagatcaagtagccagtctagtcctcgaggcgttcccaggcgccaaatggcaatcacacgtcgatcacggtccgaaccacgtcatccttggcttgcaagctcggcgcacagggaatgtacggtcattagctcaaggctctcgccatcggtactcgaactcgtgcaacctcgccgatctcgcaaacatcgcggcgtatgcgcaccgggaaatgacgcaatcgaccgaagcgcgggactcttactcgccgaccgagtctcaagaaatgtcccctacaactccggcagctggatcagggcccttcggtacccctggacggcgctcagcgctggacgaactcgctgcagcggctgctctcagcgagcggagtccgatggcgaaagggaggaagatcagttatggggatgagcaggatggcggtaaaaccaagcggcggcggaacaatgctggcaagggcgtgacggtctatcctgaagctggctctagtcgagatggatggaacggcgatgcagaaggagtcgagggggtcgcctcgagcagtcgagctgcgggaaagaagaagggtccccgtgccaaatcatcgaaaacgaacggacatgtgcataacgctaacggaggaggctccttgtccgacaacgattcgccaccgtcaatgatgtcacacatcgtctcgtcatcgtcaaacccatcgggggatgccaaggggaacgattcgtcgaggaccgtacgtggaccgagctcgaacgggggcggtaactcgagtcgagccaagacgtcgagcaagggaaagaagagcatctataccaacctcgcggtaacgagcagcaccgacccgaccgtcaaacattacaagcccaactttacctaccatgaactcatcacacacgagatcaagcggagcttcgaggggcgattgcagttgagcgaaatataccgtcggatctcagagagatacccatatttcaagctgggtgaacccgggtggcaaaatagcatccgacataacctgtcgctcaagtaagtatcacggggcctgaaacggaaggtcccttattcagttgactgatcgaacttcgtgcgtgccacccaggaaatgcttcgtaagggttgacaggccaacggacgcaccgagcgacaagtcgggtaaaggaggatggtggacgtatgtcgctcagggagatcccgacggccgcggggggaggaaggggatgtcaggcaagggaacgggggaataccgcaagggtcaaacgcccagcgatattgcatcgaggtccggttctccagaggatgggatggcgcagcactcagatcatctgaatgcgctgggattcgacgagcaggagaccattacggccttgtcaagtgcggcctacgcaaatgacgggatgatcggttccgggccggacgggttggacagacccgacatgggagcggcgggatcgtcatacgtggatcaagctcagacgctcgccatggccgctcacgcattgaatggctatcagccggaacagcagttacaaaatccacatcagcagttgcaaggtggacctcgacattgaccgcgaggtggacatgaatgatgacgcagagggaattccgcaaagggcgacgcggctttcatggcaatggaaaagcagtagatgcgtgggctttgcttcatggcactaatatgacaccatacttgtataaacgcaacgaaaagatcacctggctcgatcggtgtccccaaaaatgacatgtcgagtgcaatcgtcatcaagcggtcggatcgaacgcgaacgaatcagtccggtcgcgtcgcgtctctggtgattttgttcagagagcgatgtttcgtcgtcgtaagtcatggccgttggctgcagggtgatctgacggttgatgccgaagcagaatgtccagttcgagctgtcgacctgaagcactgtagtatcctgaagtcatagtgaattctgacgtagcaattcctcggagcgccctttgcgtcttcgctccgcgcaccgtcagataggggtagccagatctccctatattcaaggcaccggcaactagaaagggcgagctgtatccttcgactacctctttccactggcagccttccaaatcaggccacaagaccacacatcgatcgtaccgacaattcagcatcatggcgggtcgcgctacagctggacgtcctccagggcaagctacggccaaagacccatctgctgcaccacctccggtcgccagccgatctgctccatctgcaccgtcggcctccgtgcccaagaccatggccagatccagaatgaacggtccgaagcaatcgcctcggcctggccacctccccgatggacgagagatgtttttgagaaagccccgaagtcggcgaacgtgggagccggtcacgaaccatacgtgcgaatcctgtggcagtatgtaccctcgaactccgtttgattgggacgaggtatcttcagctccggatggaaggcggttctgtgctttgaaagaggtaagctgatgttcgacgcctctgaggccggaaaatgtctatctccatctgtatgatcttgtgcggggttggctgatcagcaaagagtccttgttttccatcaaaactcttttgaaaacgcgtttattcatcatcgatcaaacttcgacaaatcgacgacttgcgactgacaacttgattgacatccttgctgaaatgctatattcccatcgacaaccaattcaccaatcaccacaacaacgtttccaatccatcagcgttgccaaccttgtacattccctggactgtcgcagactgtcaaggtcgacaccctcaaggccactgtgagtgccccataccgatatgacgatcggcgaccgacttggaagctcatcattcccagtcacacatcgacttcagggcagattcattcgacgactgcaccccgactttgaaattccaccgtccctctttgtcaaggactcgcctgatacggttcggacctacacgagcggtaacgagcccatcattccggaactcgccgttccggctcagagggtcgtcccgcagccgcgagccactggcccgacgctgaacttgcagccttccacaacagctcaggtgagtacaaccacatcctcaatcagagaacgctacgctgacagcctgcatcctgctgctccagccgtttcccaaatcctccgcggtccagcacgctgcactacgctcgacctttggcattcaacccgctccaaccgtcgttccgagccctacatcatctacgtcgcaaggcacttccactctcccagccaaacaagctccgctcctcaccatgcgccagccgactgtacaatccagccagcacaacgctgccggccaggctttcgcgaagactcctacccagccgaacagcctcaggatgcccgtcactcagccgagacagccgagaccgctatcaccgtctctcccggctgtcattccgtcaaatcgatcccaggtcagctcgcgggcgccttccaatgcggcagcatcgggatccaaccagagacctttccaagtaggccccatcagggccaagccttccgctacctctgcgccagttcctgctatccctcgaccgagtagtgaaatcgatcgggtggccagtcaggccaccgagatgttggtcgccttgaagagggcatttcataggaacccaaatccaagcccggacgtcatggatctgctcgctgcgacgttcaatattgccgacgaaagggtggttccgcaactcttcgaaagttggcgcagaaacggggtgcaccttcggagtgcaggagctgggcaatcgaccaccaagaaaaacggctcgaagcccgccagcagcaaccgaaaggattttgaaatggggtccttggctacggacgagcaaaggacccctgagctggcgttcaattctcaggcagatcagcgaacgagcaaggaactggaagcggaagccgagcaagcgagcttgtttgagcagatagtcaggtctgcgaaagacggcaaaagcaagcaggtccagacgccttgggcgggttcggaacagcaagagctgaagacgaaccaagccggacttgatgcgacaagtgtgcactcgcttcggagaaccgacaagggtcataatggggaggagtcatccctgttggtggcgaacggtatattgggagtcctggatgagcctctcgccatggaggtcgatagtgtagatccaccgaccaaaaacgttgcgaccggttcattccacaatgccgcagaccagagcgctctcgaccgcccagatcgccgtacggattgctcgcaaccgacgaatacggatgatcttcgtgtcgtcatgcccggcatgacatcgcctcctccgcaacctcacctggcgcccgcaacgccgccatctaccgtaaacgaagtggaacccagggagccgcgcgcagcctcgggagcagcagtcccgcagtccaccagagtggatccgaagaatgctgccgcgctgcgaagcaacacaggcagtcccgctctaccgaaaccgcccggcgggacagaagatgcagcgcggcgagttgcaccgttaccctcgcgtgccatcgagccgccgcagaccgtgtcacgatctgttgcacaagcccctccgaccatcctggacccgaaaccgcacgaagtgatacatttcaccgacgctcccatgcagcaagcctacgagatctttacctcgccggaacctcatcgtctcggcaattggctgaaagccacctttagaccggcatcggaaaagtacagcgtggtgcagaaagacatctatactgagtacaagagccttttcgagggttctccggcgggatgctggaacggttctcaggtggtacgacttgttcgagaaatcttcccccagactgtgcttgggaaacgcttggatgagcaaactcaattcagggtttggggactgtgtcgcatcaggatctggcctaattcgccgtgggatatcttgtatagtgggaagctcagggaaggattgaacatggagccggcggtacccatcgagccgtttccatccgaatcaaacgtctcgcgggttggcgcagctctcgagtcgctggcgtccgccttgtccgtggctagactggatcaaacgaagatgcgggatatttcagacaagtgcaacaagaaagatgcagtcgactttcgacgtaggatcgagcgggacggagcgatgacgatatgggaggtgagcgagcatggccgaaagttgcaaaagacgaacagcagtactgacagctctcttttctggaacagcctgcaccgaaattcgagagtcgcttgttgtctcatctgaaattgagtaagggccggtccagagtcttcgtaccattcgcacctaatgcttttcccctccttgacctgatcacagataggtcccgcgagcctgtaccttttgaagtcgtgcgcaaggagaaacgagcgagaccgtcggtcaagcgcgaagttgaacgggtacagcaagagattgacaaggacaggcaaccagcggtgaggtcgtctgccgagcagagcgatcccgtcgacggatccccctatcgacctcttgtcttggaacgtcaaaatccagctgggcagagcggtttctacccaacacaagccgaacgacaacctcaccagagtttgcgattccaatcaggccgtcacccttaccaacccacggcgtcgcatcttccgtcacgtcttgcggaactggatcgcgcgcctggacatgcctcttctcaatacgactcatcccctcatcggcaaccggttcccacagccctcgcccagccaagagctcgttcgccagtcattcagtcgcgatggtatcaaaacacctaccaacctccatcgtcgattcccaactcgttcctcttgcccaaaccgagagaaccccattacccttcgtcatcacgagcccaacatgagtcaaactcgacaagagccccgcaggtcccgcagcaacaagctttgccacgagatcatcggccgaaacgagctgtcgacccgtatgaagtcttgtacgccaatccgcctcctttcccccagcctccccaatagacgtcgacgggcgagattgagtgaaatggaacgacactactgtactactgttgtatcagagtaaatgccaatcgaagaatacgccatgagttcatgtgcatgatcaggcttcaggccgacaagccggagatttcgcaaggctgatggcggccacgacgaaggcaaacgtgaaccgcgagacatgcaccagagtaatctgaccgttggccgcgagtccgagctgacccatcttgatttgtgattggctgcagtattggcaatcactaatcgccttgacgaccacgctacttcggtgatcgctcgcgtggcggcgttcctccggggaaacgccatcgagcagatcgccttttcggtccaaaatgtcgccatcggtcgacggaatcacgacagcgaggcaatgagagcaaagggcggcgggtggacgtctccctcgggctcactctccgggcacacattctgaccctggagatctgttccatttgacgtttcgattggcccttcgcccgttgacccccttttgtcctcctcgtcacgttggtccccacctcgaccggagcacctcgcggggtacctttcggttacctgccggtcccaatgattggcacatttcttctcggcgagatccgatgccgacccccgagcgggcgaacggggcaacgacttcgcatcacgacatttcgaccagtcgactcgcaacttggacatttcaaaggggtcgctagaacttgctcgctcgtcatcctcgaatccatttacaacgctgacctagcgagtcgacggtgggtaatgatgacgttcgaaccgggtgaggcgggaagcatagagttcagtcgaagtggtagggcacacatatataagatgcacagttcgaggtcgaggaggatggggatctggatggcacggggacgggaacgaaacgccaagaaacgtgtcttatcaaatacaacctcctccctgtgctctcacgacaactgttcctgtcctgccgcctcttcccctcgccgccgccccggtcatcatcgtcatttattttgatttgacgacgactcgcacggaatctgctcgaggaaaaggtcgaaatcgagtggtgtcacacgagcatcacgcaaagcacaaagacgaccagcacacgacgaccctataaacgtccccttctccaccgaagtgcgccggatcgaacccaactctatctgaaaaggctcatcaaggattcaaggatcaatataaagcctgtcatcctgtcaagacatacaggacgacttttacgcatatcatcgatcctcatcatttaaagacttctttgaaacgcgtatcaattcggtatcaacagaaaaaaacgtaaatctccttcatcatgtccgtcactcctcccccttcgtaccctcaactccacccggatctgggtcagaccaccggtcataatgatagaaaggtcgccctcgagaccacccctcaggacctgagcgccgcgctcgacgaggcgcaggccgaggcgatcggactgcccaagaagaaaattcatcaggtcgagcaacctcagatggtcaacgttttcgtaagtctatctctggcgagcctactgcggtcctccagcagcgtgtccatgtactgatttactatgttttgccatggcatcacggacagaattataccggggccgttttcggagaggacgagcagtacgatcacgccgagtttcttgtgagtctcaaacgatcgctcttgtgaccgctgaacatcttgctaagaacaatcgatcattcacagccctcgttccccgagatcaccttccctcctctcgaggaattgccctttaccgaccgagcattcttcgccaacccgcaaaagacccgtctcttcaaggaggtagaggcgcaaggaggcaagatccaattcatgaaccccaatatcggtgccgagtttacgggagtcagtctgaccgagctcagtaacgatgcgagggatgacctagcattgctgatcgccgagcgaggcgtcgtcggtgagtgaccgagcgcgcttagacgagacattggcgcaaaggctcacattcgataccccaatagtcttcaggaagcaggatgacatgacgatcgaatcccaaaccgaattgggaaaacactggggaccccttcatattcactcgactactggtgttccccgccgacctggtcttgaacacgtccacgtcgtttacgccgataagggtgccctcccggacaggaccgcgtttgccccgatcgagctgtaccactcggatgtgacgttcgagcttcagcctcctggtcctaccatcctccgactgatcaccgcgcccgactgcggtggcgatactctgttcacctcgggagccgccgtctattcgtcgctgtcgcccttctaccaaaactaccttgacaacctgtacgcagtacactctggcaaggaacagagcaagggagccaagagtgccggtcaacatatccgacgagaggcaatcgagacggcccaccctgtcgtcagggtcaacgtgagtcgtaaagcatgtcttggatttagaacgttcccccggctgatccgcattccgccccgatgatagcctgtcaccggtgtcaagagcatctttgtcaaccctggattcactcgccggattctcggcgtctccaaggctgagagcgacaacaccctcagcttcttgtattcgcaattcgctcagactccagaatacaccgctcgggtcaagtgggaagtcaacgacgtcgccatctggcataacggcttggtgaaccacagcgcgagcttcgacttctgtgagtcttaacgagcgtttgcggcatatcgatttgcgaaccaggtactcataacagttgaactacagggccgcaacgacgacacgcgcttcgcgtcacgcctcatgccgagaggcctatgtccgttgccgagtttgaagccaagtacggcaaaaaggctgtggatagcgacaccatcaagtacaaagctctcgggatggagaagcccaggtacaacgttactctcaacaggaaggaacgaggcttcaaggattagtcgcaggctcccggcgggaacagtcgacccgcgtgaccacctccgttccaattcttttgacccttttttaacgaacccactttacgatctgtacggttcaccaccgtgctcttaacgttcttgttccaaattgtttatcctcgttgcgtatactgtagcattccacatgctcgagtgttcttcttaggatctgtagctcagcatacatgttcttgccccaatcttgtccgttccgatgcgcaaagaatcgccgcacacccacacatgtcaaatctttctgccgacgaatgacatgcttgaagcatacagatccgaaggcatcagactttgaaggtgacagctggtgcgattgcaatacgacgacgatgagaaaagagggaccatgtgatggaccgggatgatgatctgcgtgtcatttctcggtttgttgacgttttgcgctttccccctttcgccgcctcgcgacgcgaaatcgctgctggctcccttccccccgtaaccagatcaaggttggccgatgaagacgtcctcatctgaagtagaatgcaatcaccccgagtccccatcttgccattcacagactggtagaacgaccttatagaacagcctgatcaaaacacacattcgctatgcctcgtgaaattatctccgtatcggtcggtcaatgtggaaaccaggtcggtaccggacctttgaactcgcactcggcttttgttgttgtcggtttgcttaccaagctcgatattctcctgtatattggaaccagctcggtcaagcgttctgggagcagattctcaaggtgagtagaaagagcactccagccggcgctgtccgtgcgtatctgacgggctgccttgtgtttcgcggtttgataggaacatggcctagacgagtcgggaaagtacatccagggaagcggtgacgaggatcagcaactcaaaaggctctcggtgtacttccaagaagtcggaggtagccagaacaaatacgtgcctcgatccattcaggcggacttggagcctgccgtgattaacaagatcaaggctggaagactgtccaagttgttcaggcccgacacgttcattcacgtgagtatagaatgatgtcgttgcccgcatgtgacgtttgctgaacagagacccttctatcttcaggctcaatcgggtgccggaaacaatgtaagggtggaccgtcaccgacgctttccgttagccgtcactcatcattccctcgcctcagttcgccaaaggtttctacaccgagggtcagtttgaattcttcgccacgggaacgcaccactctaggctgacagaatgcttccaacgcaggtgccgagcttgtcgatgaagtgctcgacaacatccgtcaacagacggaaaacactgacagtctgcaaggtttccaattgctccattcgctgggaggcggcaccggttccggtctcggagcgttgcttttgagcaagatccgtgaggagtacccggaccgaatgatggccaccttttcgattatccccagcccgaaggtctcggacacggtcgttgagccgtacaacaccttgctggccacccacaacttggtcgagaactctgatatcacttgctgtctcgacgtgagttccgtcctttgcctcgtgtgagcgaaaggtccaacctgatcgcgatcacttgtctacagaatgaggctttgtacgacatctgcaccaacttgatgaaagtcaaggttcccacccacgaagacttgaacaatgtcatcgccaaggtcatggccggtttcactagtaagacttctggtagtagcttctactgtcgtcgtccgatgccaatcacgtatcatttgcagccaccctgcgtttccccggtgttctcaactcggacctgcgaaaattggctgtcaacatggttcccttccctcgattgcatttctttgctgtcggttacgctcctttggtagcgacccaatcgcgagcctaccaggtaggtctcatcgcgcctgccgcgtggcatagtatcttctgcgtgctcatgtccggttatcatgacgcaggcctcgaacgtgcaggagctcaacgctcagctcttcgaccgtcgatcttggttggtcgctgcagaccccaagatgggcaagtacttgaccaccagcattgcctaccgaggaaagctcagtatgcgagatagtaagtatttcggcgagttgcgcacgcgtgtgagtgacagttactgatccctcttccgaacagtcgagaactcgtcgatggaataccacgaaaagcacagcgcatcctttgtaccctgggtaagttgagccacttgtgcggggagaatctcaacatcatccttaccttgcccatctccgctctctcgatcagattcctggcaacactcagaccaccctctgtcaagtaccccccattggtactcccgcttcggctacattggtcgccaactcgacgagtatttcggaagtcttcaagcgaaaccactcgcaattcgtatccatgttcaggcgaaaggcgtaagtgtcgcttcgattggatcgctccacgtatactgacctgtctgttatcacgcagtttcttgcacggttacaccaacgagggaatggacgagatgtaagttgacggcgatttcagaacggttgatgcgacggatcacgctaaacgcgcgcttctatcagggaattcaccgaagccgagtccaacttggccgatttggtcaacgaatacgagcagtatgccagtaagtcccaggccaggtttggtcgtttgcatctgctagaacgctgactaattgggacgtgtctaataggcgccgagatcgacgacgacgagtacatggaggaaggcggcgaggtgagttggccctggttgatacttctaatgatggctcctaatctttcatgccgagtctcaggaacaatacgaaggatgacacaaaaaggaataggctcatcaaaaaatcccaatccagcttgtagcagagtgtggacatctccccctacacccgaccttcgacatccacttcgccccgtttcttcttgtctcctctcttcttttgtcttttggttttttttcagggcgatcagccatctcttctttgtttttctcggagtcttcctaggaatggtcggtatcggggactgtcgcattatcgaataataccaagtctcgcaaccctttccgacctgtcaacgcggagcgcgtgcctgcctggttgagcacaccgtggtgcgtagttcaggcaacaaattggaccgctcgttgtaggggcgagataaaacggccggagagttatccctgtcagggcgaatggcgttgatacgatgaatggtccaaagcaatccgagtctgaccttgactgactggactaacgcgtgttgcttccatgcgcgataccgttcaaactcggaaaacgtgtcaggttctgttttctcgttccctcagtagcagcgttcatcagaaagtcaagtctcgtcctcgatgctcaataataatatgttcatgtaaagaaggctggaaatacgcccactacgattcgctctgcatagatcgacttttcggccagcatcgctgccatccgctattatgttcaaaagggccgcccgtccaggtttgcctattgcagctgaggcactctcaccggcagctacacgactacgagggtgttcatgtcgtttaagcactcgtgagtgcgacttcccgcctcggccgttgtcatatagccagctggtacgatactcaatcaaactttcaccgacataggatctcgatcacaccccatccattcgacagctcgggtttcgatctcgcgtcgaccggatcatcatgcacggacggaatactacggagcgggaggagccgatcttcgtgcgctcgcgacgtaccgagattacagggaagcaaggaacaagatcatgaccgaagaggatagcgtgatcctgaccaagaaaactctgccgggtctgctcgaggggttccagagtatggctgcatcgggacggaaaccttcaaaggaggcttacctagctctcctggaagcggcggctgaatattcagcgtctcgagggttcacgacggatggcgggaagatcgtcgagacgtcagaggacggcgaatcagttcaagcgtttcttcccgagcacggagagacaggaatgggatggcaactcgcatggtgtacatggcaggatgctcgactgggcgatatcgatctcggtgttgagggcgtggatcttctgatcaaggtgagtcgaggaagctgggcgatctgcggattcagaccatgaactcaaagtgactctcgcacaggctgctaccccgtaccaacatctcttgccttccctgcttcatttcgctctcgacactccttccatcgcttccagcctgacgacccaaacctacgatgcgatcttgcgagagccgatccgttcctacaatgtcgatcacctcatccttatgctctacgagatgaggtctcgaggcaccgaattgtccgctggccgtgcggggcagatcatctcgatcacgacagaatacgggcttgtcaggctcgcgctcgatctggctaggcaggaggagggcgagtatggaaatgatctcgagactcaagtctgggtggacattttgcgaacgagcgcggatcgatactttgtaagtgggaatcgagccgtgtcttgcgttgcgggtgaagaaaaaaaggagttatcgctgatgcctattggcgatacaatgaacctgcagatcgacggcgtcgaggccgcttgggatagggtggtacgcacaggagcctttgagcctgacgagggattgtgcaccacggtcattggcgtggccggtcgtcatagccgacctgaattggccacgagcgtcatggagaacctgggtcgacaagggatcgtaccgaaagagtaccatttcccccctttgctcgaggcgttgtgcggaagcggtcgggtctcggatgccatggaggtcttgacctcgatgaggaacagcggcttccacgccgacctgatggccgctgaaccgatcgtgggcgcgctgagcaagtcaccggaggacgtcgacaagggattctatggtctccaagcgcttcgaacgacgggcaagcaggtcgacgtcgccgctttcaatgccgtgctcaaggccgccgagacgctaggcgatgcgaaccgtgccatggtcatttaccgccaggccgcaggactcggtgtggtccccaatctcgagacctaccacgtcatgctatcggcgtgtgcttcggcgggtgcgatccctcaggccgagttcctgttgaaagacatggagaagcgtggggacgaggtggccgacggggtgacgacgacgtcgttgagctcgtcctttgatgcgacgacgtacgcattgttggttcaactctatctgacgggatccgactatgaaaaggcgttcgagtatctcgagctgatgaagagcaaggggatccgacctcccttgtcggtgtacgaggggttggtgcagaaatgcgtggccgagggggacggacggagtcagccattgttgcaggagatgcaggccgggcagtacaagccgagtgctgcactgatcgagtatgtgaagcgggccgcttgggccgagaacaaggagcggggcgagaccgattcgggatcgaaggagaggaagcccaggcgatcgtttgatggatcgtcgaggaacactgctcgggcgactacagcatcgggcggtgtcaagtcgacgtagggtcgttgcggtgggatgtcatcgaatggtgaccagtgcgcgccagtatatgagtctatgaattcgtaatcttgattggtagttgcgggattttctcgtcgtttgggttgtcaaacgttgacccgagctatcgaccacgaggatcgaagtgaaaccgtccaagtcattttattttattggcaccttgaattcgatcgatgacgcaccatttcatccctcgccagcgagcgagtcgagtcgagtctcgcggcgtcagttgtggtagttgtttccacctcattttgccatcgccatcgccatcgccatcgcctcttgcctgcctgcctgcctgcctgcctctcccttcctcagctcagtactgagtggcagctgacactcgatggttggacggacggaaggacggacggacggggtagtagctttggtctcgtagacgactgaccatcactactacgttgctacgctactacgctatgacgatacattccaccgggcttgccaacctaacctcccccttgcgttcgaccctgaacggcttccacttgttcagtcacgcatctctcttttgacgttgcatccaccccacccaaccacatacatcacacccgcaccccgatctctacctctcgactagctaccaggtcatcaccaccatcgctactctacgactcccacacggcggattctactgtactcggtcgtcaacgtgagtgtccgagcaggatgttatggtcatcagtagtgtagaggcccgggctatccagctcgacggacttcacattcccttggcatccaaagcttatgattactcactcctttgaccgtgcaattatgtagcgggatcactacccttcacgcccgttccctttcagtctcgaaactgatcgactagtttcctcggccccgcgactcgctcgactacaccctttcaacactgaacccatacgatcaccttggcttcgtcctcgttatcgatccaacaaggcatgactacagaaggcaaagccgactctagctcagcaactgcctcgacctcgacccctaagcagccgagtggctcatcatcgatcaccgtcccggcgaacgacacatccttgtcgacacccgagaccaacggtcaagcgtctgcagccggcaggaaaccatcccagcgtcgtccacgaggacccgcgaggaccggatcgcaaaagcagaccaccgacgtcgctgtcacctcagccgatacccagacgccggccggagacaagaaaccgtctttgtcttcaacatcgtcgaggaacgccaacaacaggcgaaagactccgactgccaacaagccgacgtcgagcgacaagccagccgtagcacagacggattcagctgtcaaggcggaatctaccaccgggaccgctcagccgaagcaggctcagagcaataaacctcggaccggagacgtcaggaggcagcagtctcgacgcaactcgaacaagtctaccttgaccgttcccaactctacttcagccaacgtctcgagtgctggtagttccgtaggcgagtctaccaagtctgccaataccaacggcaagaacaataggaagcgggcttcgaaccaaaacaaggaggacaagattaccccggccgccaacacccaacccggtaacaacaccggcaacaagttacacgccatcgtctcgccacctcgaaacgcgatggacattgcgaaagctacacccagaaaccccgccagggacagagaggctggtttgggaaccgtcacgagtttgcaacaaaagattgacgagctcaagacgttgccccccgctcccgtcaacacgaccggaatcggcagaaggacgagcttgacgctaggcagtgacatggcttcgagctcgcctctagccattcccggtgctggtcaggacacgtcgtctgccactcgatcctcgttctcgagcggcagccagggtcgactcaaggcggacgctcccgtcttccagccttccaactcgcccgtcgctgccagtgccatgatcagtcccggtgccgagaacagcgccgccattcggggacagcgacaaccttcaggctcgtcgactcggttgagctttagctcaatcaggaggacgagcaacgccgctgatcaacaagccggagtcgatttcaacgagagtcgacagaacgagtgagtttggccatgatggatcgaggagaatcttaccctgaactgatagagcttggttgcctatgcaggaacacggctggatacacccactctcagcaaccctcgctccagcttttgcaacaactgcaacgtcagagccagcctcaacaaggctcggtcccacctaggtttgctaaccagcggatgtctgtccggggaatgcccgtctacgaagaggaggccgtcgacgacaggaacgacctaccctcgccgcctgccaaccacccgcaattggctcctggtttccagtttggtgcttcacgaaggcagccgagcacgggaaatcaggctcacgctggactcgatgacgctctggccgccatgaacattggcggaggattcgacatgggtggcattcaaggtcaacaggcgggcttcagtctgcccactaccggaggcggcggtgcggcttcgggaatcaacgccaacgtgctcgccggaatcgctgctagagccaatcagcgccaccaagccgagtacaatcccgttctcgaacagcaactcatgcttcagaagcagatcgagctgttgcaggaacagcagcgtgcgttgttgcaacaaaacacgctcctccagcagagcctcggcaaccccaacctctctgcactgagtcaagctctgctcgcccagacagctcaacagacgcaatatcagaacgatgaccagagtcgtctcttgcaggaacagtacatcaaggttttgaccgcacagagcttggctcaaagtcagcagctcgccatgcagcaagtacagcagcagcctcccatggctcaagctcagcaacagtcgatgggcaaccatcaacgagacccaagcagggcttccaagtcgggaatcaatgactttgtcctgcccaatttgggtcagggcgtagctcgaccatcgagcgcgtccaacgatggccctgctcgtacccgtcagatgagcgacatgggtcctcccgctgctgggcttgccggtcaccgtcgccgcaatagcgtgcaaacgcatcgtcctcagaattcgatcatcggatccttcggtggtttcgttgccgacgtccctgatgacgccgtcatggctcatcaccgagccaacagtcgcagcgtcgccaacggggactggcgcaattcggggcccaacaaggaagccgtcctcgacctggcctctgctcaggctcagttgcaaatgctatccaactttaggtcgaatcagatcggaggtggcggtcactcaaagatggcttcgttcagcttccccaacatgttgcccaacttgatgatggcgagcaccatgggaccggcgactcagtctatcgtccagcagcaacaggctttccaaatgcagctccagcagcaccagggacccggtcctcagcgaaagtcgctgtttgcaccttacttgccgcaaggctcgcttcccgctcttcttgccgcgggaaagctcgttgtcggagtcctccgggtcaacaagaggaacaggtctgatgcctatgtcgctaccgacgtcttggacgctgacatctacatttgtgggtccaaggaccgaaaccgagccctagaaggcgatattgtcgctgtcgaattgctcgacgttgacgaggtttggggatcaaagaaggaaaaggaggagaagaagcgcaagaaggaagagaactctgcttacgaccaaggtatcaacaaggcgaacgcccgaaagaatgacaagaaaaaggacgacgtcgaagttgagggtcagggcatggttctgttcgacgacgaggaggtcaccgacgagcaaaggccaacctatgctggtcatgttgttgctgtcgtcgagcgtatgactggtcaactcttttccggtcaattgggcgtcctcaggccctcgtccgcagcgaccaaggagaagcaagatgccgaacgtcgcgagcgcggaggtgacgatgccgaagtggacaactcaaggaagaataacgatcgacccaaaattgtttggttcaaaccgactgacaagcgagtaccgctcatcgccattcctacggagcaagcacctagcgattttatcgataggcccgacgcgtacgcggacaaactgttcgtcgcgaccatcaagcgatggccgattacgtctttgcatcctttcggagctctcgtggacgaattgggagctatcggaaacctcgaggttgagaccgcggctctgttgaaagattgcaacttccctaccgaagagttccaagaagcgaccatgagatgtctgcctcctgttccctggacgattccagagagagagtacgagatccgtcgagatatgcgcgaggaaagagttttcagtatcgaccccgctactgccaaggaccttgatgatgctctctccatcaagaaaaaggaggacggcacctacgaagtcggcgttcacatcgccgatgtctctcactttgttcgacccaataccgcactcgatcgagacgcccgtaaaagagcgacgagcgtttatctcgttcaacgagcggtacccatgctgccccctcttctgtctgagcagctctgcagtcttgttccgggagtagaacgcttgaccttttcggtcttcttcacgcttgacaaggatggcaacgtgatcagcaaggagttcgcgaagaccatcatcaaatcttgcgccaaactcgcctatgatgatgctcaacgagtgctcgatggcggcaagcttgacaaggatgtggaagagggacacaagattgccgatgtcgagggggacatcaaggctctcaacgatattgcagtcaaactgcgggaacgcaggttcaaggatggcgctctcaagattgaccaacccaaattgtcgtttgttctcgacgatgccggcaagccgcaagacgttcgaccttacgttcgtaaggcttccaatgacttgattgaggaggtaagagctcttcaggttccacgacccttaatactgtggctgacgccctgaaatatattagtacatgcttctagccaacatggctgttgctgctgtcatcgttaatggtctgcccgagcaggcgctcttgcgtcgtcacgaagcgcctatcaatcgacgagttgaagccttcattgaccgtgctaagcgccttggtttcgagttcgccggagtcggatccagcgacatgcaagccgggtttgaagatgtgaaagacaacggcgacaagctatgtcttcagatcctggctactcgagctatgaccaggtaagtctagctggaaaccgtcatatttgagattcgcgccctcaagcttgtgccgatctccacacagagccaaatatttctgcgctggtatgcttgacatcgcaaaatatggacactttgccctcaacgcgcccgtctacacgcacttcaccgtaggtctgcttgggtgatacgttgcgcttgcgcgagcttatacgcctgcacgcccttttcagagtcctatccgtcgatacgtaagattatcaaagcgctcggcgctcgtggtgccatagctgacctcattctcataggcggacatcttggtgcaccgcatgctcgaagcatccatcaacagtggtaaggcagacagccaggtccaatacgactcgcgatcgccgtctaatagctcaatatatacacagaggctcccgaagccaagttcgtgatggatcgggatcaagttgcgaaatgtgcacagcactgcaacgccaagcgagatgctgcgaagattgctcaagaacagtccgaccaccttcatctttgctacctcatcgatgaccttacgaagaagtatgggccggtcgtccgagacgcgaagattgtgggcgtactcgacagcgctttcgatgtggtggtggtgagtcgcacacttgcgtttgtcgaagatagcattgcacatactcatgttcaacaattgttttcagcccgaattccgcattgagaagcgtgttcacgccgacaagatgcccctcttgaaccacgtgtacgatgagcacaagcgcaccctttcgtgagcatacatcgtacacctttcgctgtgcggccgaactgacgatcaggaattgctctgctccagactctactgggacacgaaggacgtcctttcttacctcgctgccgagaacgacgacgagtacatcaagagggtactagcccaaggcaaagatcgcacggctaccgacgaagacgccaaggcttcagttcaaggcaccaagtcggtcaacaaggacccgctcaagttcgagaacgtcaagacgacccctggaggtcatcgaatccaggtcattgaggaattgcagaccgttcctgtgagtacgatttggcaagtcgcccttgtcgcgagatactcagctcatagagaccctccgaatatcaaaggttatgatcgttgccgatgttaccaagtcgccacccgtcatccagtgtttggcggtctcgcccttcgctttgacgcaggaataggcaagacgacgcgcacgaaatgctctgtttcacataatttctgctgctactgcagcaaatgtatcaatgatcacaaatgcaatgactgtctcgcatcaaattacatgtgtacatcaattctgttatcctccattgttcttcaaacataggctggacctggcacagactcttctgacttctgacaggcgagcgggctctaaccgtaaaggtattcgaagaacggcgtctttcccctacgctgagtggcgcgttcgttgtccagctttgaacgtcgttccgggaagagatcgatgtggagcggtatatcaaactcgctggcgaacggtgcgaccgattcgctggggcgaggcccttctcctggttgcgtgatcgtcgcgctgagcatcatagaatccagcagactacttgttgactccgcatagccctcttcgtcagatgcttctccgtacgactcatcgccatcatcctctactttcgtgggacgcgcatctccagacggcttgctctcggatcggcgcttccgacgcaaggttgcgggcaatccctgactactctccagcggcacgagagtggtatctccttcaatgtccgactcgacatcatgtccgtgatcaaagcttgctgaatctggcaagaacgacgcacgacgggcagctgatttgaccttgcccctcgagcttccgcattccgtctcggtatcgctttcctcaagccgagagctagcaacttccgaatccgacgtcgtagcgaagcccgcttcactaccggtcgcgaaatcggtatctaattcactgttgtcgggcgtcatcagttgtagccgacttgaaagagctggtgtgtgaagtgccgagggctgaagaatgtgcgtgatacggtaggcaggcgaccagttgtaagccgcggtgaaatcatcgtgattggtaggggtgggcggaagcgtttgacctggccaagagaaacatcgaaatgtcaacgatccgagccagtccccgaaaagatctacttactgaaactgatgaggccatagtagcgtaccagcagatgtacgatcagtctctcccagccatcggcgatcgcccataccaagtgacccggtgctcggaccaactcgatgatcgcctgtcgctgcgtggtcatgtcgtaggagccgctcatagacgaggtgtatatggatgtgagcagacttgacagtgagtgcggcgaggaagcaggatgcgtggtaaatggcctgggtagcctgtttctcgggttggatgccgaggaccccgccaggagatcttcttgttggctctgcgagaccgcctccgccaagggagcattggctttggatgtattggccgtttgggtgcacttgatatggaccagactcgtgtcgataattcgaggctgaccaaaaccgttcaaatcttgaataagagttccctgtagggtagcagcgatctcgtcgtcgtccagctcgcatccactccaccccctaagctccttttcgacgatcttgacgacgacctccgctcgacgaccgcgtttcctgagcatacttcgcacgcccttcaaactgagggtgtactttccagcttcggttgacattggttcagatactggagctgctggtgatggcaccgcggccgtacggatagcggcagcggcgggcgaccgagaggaggggtgagggaaagtcgaaatgtatttcggagcggatggcatcaggtcaatgcgggagggcaaggcggcatgtggattgtgagccagcattgctaaggcagtttcacttgcgtgagcggtgatgttcttgtctgagcgagctatctttccgtctcaccgttctcccggcggcgttctctccgctttccaaccttgccgaccttgtcatcctgtcgctttcgcgcttgagcgagtccgtgctctctctgttgggcgatgtaagattcccgggcagcttgctctttagacttggggtttaccaagatcgagggtatataaagtctattttgaagcgaggcaacgtcaagaggagagatgcagagatcactccggctgatgacgtaccgtggtgtctccgtcggcagaggacctgtcgcataggtagtcatcctggatggcgtgaactaaaggatgcagattgtgcagtgcctggtatagatctaaggtgttgtctgcaatgctgttctgccaacttgtccaggagctagaccatgagacgattggaaggagatacatcgtgtcccacaagatatgactctagctactctgctgctcgcatcccggcgatcgcggtggcggggaattcgatcggaagcaaaaaaagagaggcacgatcgactttgtgaatgcaggtgggggaacatcgtcgtgaacgttcattgacctttatatgttgaggcggtgacacgttttacagcagaaaagggcacaggcagaattcaaacgtacaagcatactgtatactttctcgctttcaggacaggctctattgtctacgtaaggtgcatgtatggaggaaaggaagcaagggttcatcaggtcgtcttcgtaatcagtgttcgcccgcgctccgtggctctgctgccctaactcttcgtcacgaagtcatcactgcttgtcatgtgctcgtaacagtctgaacaatccatactcgtctgcttcagggtgacgccccccgcatcgaagggttcaggccttgaagttgacgaagcgagttgactttgggctgccaaggatccgatctcacgccgaagagcttcaacgagcttatcgtcttcgtcagggtcattgcgaaccgggatgtcctgattcccacgatacatgtgtcgagcgagacacagatcctcaagtatacattggaggagactggcaggtccttgcgtaaagatctgactggatgaccatcggccaatgtcgtgtttgcttttgtaaagtggagaaaaggcgtgcaaggtcgaatacaattcctgtatttcggcatcgctcatcgttccgtcatcattcggatgctgatacgctaggagattgtcagggacgagatcttcttcgcaagactggatttcccatccgttctggctgtcataggcgcgggaccggctgtttgtggcgctttgcgactcctccgtttcttcctcctcctcttcagcaggttccgattcgttaccgaccacggcctgctccatagtgagtcgatatccgttgttctggaagtgatcgacatccaggtcggcacgcatcggcaggtaagatcccgacatcaagtaaggttgaatggagatgttcctgataccgcagaaatcggacttgtcgagccagaaaggtgttttcaaaacacctttattatatttttcggcctgtcggtcccaagaacatgtgttgatcggaacgtcgatgggcatctcttccatcgaatcggtgaacccggtggctgcgtcgcaaccgttctgatccatgaggctcaatctcaaagcctcctggatgcactcgctctctgttctcctcaagtcgaaatgatctttaacgagatcggatggtcccagcggttgataggtgtcctcatcctcgatttcgtctgcatctgtatccgaaatgacgctctttgatttcatttccttcgaatgagcagaacgctcgtcgtcggtcgagctgtgccggagataagcggaatcctcgggaagatgtcggtcgaaagaaggatgaacctgctgtgccaacgcagaactatcccatacgcctccgctatactgtcgcgcaaagagtccttgcccgctatgacggagattgtccagcgtttgagctacaggagtggttttttcttcccctcggcgatggctgccgggattttccccgataccgcccatcccggcaggtaacataccgtccaatgcgacgtcgatgtctccgaaatcggtctcgatttggtcattctcgtcctcatcgacctcttgctcctccaccacgtagttgaactggggtagcaagatttttccatctggatctctcggccgagtgtcattctcatagtgatagctcctcagactcgaatgagtcgagcccctggactcgtcatcgtcaccttcctgcggacttcctgatattctttgaaacgctggcgctcgaggggagatgtcgagcgatggtgatgtttgcgtcgaacgggaaaacgggacacctgtctgggattgtgacttgaagagtggcaggaaggtagcgtcttctgcgaatagaaatcaacataggtcagtttctgtctcagtctgatccaagagttacagcgagaagctgacctcttttgcgttgcgtgtctacctggatggcgtccgggtcgtcctgatcaccgatgatctccacctcgtctttgtagtgcggatcgatgcgtctctcgaaaaaggctccttctctatcagacccgttgggcagcgctcgttcgccaggttgacggtctgaacgtcgtgacgaatgaaagctcggcaaggaatgttgatagaagtcctcaaaagagggagactgcctctgggaacgctgaacgcgagcgaggttagtcttttcccccaataccagatttttctgggtgcgtttgaaaccttgaccgatggacatgtgccgggctccatgaaactttccagcagagccgacgctaatgacatgatgggtttgcgtatcagctgtctcggtggtccggcggcatcaggtgaaacgcgagaagcctgctgattcgactcgcctcggtctgaagcccgtcctgtgtacgccggtcggcatgtcggtgcgaaatggaatggagagactttatgtgagaagggtggcttaaactccgttgaacgtatcagtcggtccgatcggtgggacattaatcacttctcagtcggtgttgttgatagatgatccgaaggtgtgtgatgttcggatcggatctgagagacaaactctagacggtggaacgaactttggatcaaagtcgtcgttgtcggtcaaatccgatcaggaagcagggcgagctagtgagtggtggcaggggaaggcagggagaagggcggaggagaaggggaaggaggcaaggcagggcagggaagggccaagaggagcacgcggggaggcaattactcggaagctgatctctctctttctctcgtcatgattccgaatttacttccgattcatcaatcatcgcatcatcatcatcatcatcatctcgattcatcatcatattcgagtgggtacgaggtagtaggtagcgacgtagagactttctgataccatccatcttagctcaacatcagcttatcgtctcagccatctcaatacgcattccctcgctacctcgaatcatgccaccggtaccgcctcaatccagatggcattgctacgcggtacgtcgatccgggcgcaaagacagagctctgttgcgtttcatcgctcaccacgtccccatgatcggcccacgctagtgcaacagctactttccagaaccagtcaggacgaacgaggatgagcttccgctttgtcccaattgcacgtcggatgtcgtcgtagatgtgagccgctctgcccgtccctatatcggcgaacatggtgataaggatagcgctgaccaggtaagccctgcacgccctcgtagcgagaatctgagagcgaagatgggtggcagaccgatggttcggcggatagggaacaaggggaagaccccccgtcgcctgccttggagcccgcatttccaggctttttcaacccgcccagcatgaccggcaaccgtaccacggaacccaggcgacaaccctccaacaacaattctacgatcggtggcggattcttgggcatgttaggaagcgccttgggaatgatgggtgacggaaaccaagaagacaatggaaataatgatcgtacctccaacaacggcggaccttccatacgaacgttcaggtttggaactcccggaggtggcggcatggtcgccggaggttcgatatccttcggaggaccctcacgccttgcgcgaggtcaagacggccgcatccctcttatggaatctcccaacgaacagagatcgaatatcgggcaagacactaatcggctcgaccaggataatgctcgccatgggcccgctcgtcaaggtccggacgagatcgatcagtttctggcgggtctactcggaggaccggtacgccaaatgggtgggcgcccggacggaccagcagtcttcaccaatgcccgtcccggaggcattgctacaaatcgaccggataccatcgaaggcatgatgtcggccttgatgatgcacctcatgaatcctcaggacgatgaattgccgtggctcatgcggagcgcgggactcggggcagccgatcagggaaggttgggcgactatgtatacactcagggtaagtcctgatggtttccgacccgactgcggccgacattaactaatccggatgtgatcctgttcgcccttgcagagggctttgaccaagtcatggagcggatgatggaggctgctggtcagcacaatcacccaccaccggccagcgatactgtcatcgaaggccttcctcgtgtcaaactggatagccagactctgggtgagcgaacgccgtcagaccgctccgcgggcgtattcgtgctgatcaagattacgaacggcttgcgcagaatcgatacaggagacgaactcgtcctgtaacatctgcttcgatgacttccaactcgacgaggaggtcgtgagaatcccttgcaagcatatatttcacacgccttgtctggttccctggctcaagcagaacggtacttgtcctgtatggtgggttatcgtttcgagagaaaacactccaggtacttcgagctaaaatcgcgatttgtttcgtgttcgtgcgcagccgcttctcgttggtacccgacgcagaagcccaacgttctgctgcgagcgccagctcaccaggtggaagtcaggacacaccaatgaacccatttgctgccgttctcagtggattgtctggcctactgggcgggtccaatacggcatctacttcaacgactggagctccggcatcagaaaccactgtacaggtcgacgatggccctcgagctagcgatcaacaagctgacgaaccgcgagagctatcatcctccggtgacattctcagccctgtggcaatcaccgcttccggcgagaccgccccggcgtctggtgcggaatcgcaaagcttgaacgatgaacgtcatgaacagccgcccatagaagggccggtacagtataccagtggcatttcagactaccgcgaaacaatgcgtcgccgagagcaggagttacgacacagacagacgcagaccgataatgagccgggtcgccgaggtgaatgagtagcagaatggcaggcaaggtttgtgcattcaatcaacatccgattgtaaaccgttggagatcacttattatgaaattgtatatgaaactggcatagttcgatgtcgctgtagcactttatcatgtgtcattatgcccaatccggagtctcccaacgagaggacccaagagaaggctcggtgttgtgctcggttgtctgtcgcagatccccacactatagccgaacaaaaggatcgaggtgaagcgaagttcggcggtgatcacggtccggggccatgagaagcttgtctgacgagaagaaagcgaccgatatcgtcgtacatattcaagtcacccaatcccatagataaatacaagaggtccgcattcctgccgaactttctgcctctggtgttacgtctcattcccgctatcaaatcgtacgattgaccgcttcccctttatacacaaacgagcaagcttcgcgccatggaagactccgccgcggctccagccgtcaagcaagaaccgaacggacgattgaccagtccacgcaaacgatcgaaggctgcggacgatgttggtgcttccccctcgaagaaggcaaagtccgaaccgaaaaccggcgctgacggggagagaaagaccggagcgtggtccaaagcggaagacaagcttctgtacgggttggcggtcatctcatcaattaggcagtttatctgacccgaccttgtatacagcttcgagcagatttggcaaaaggccaccaacgtcaactggaaccaagtatccggtcagatagaaggtcgcgactggctggtaagccccggatggcgccgctgcctcgatgaatctgacgtgatttggttatcagagttgtcgcaacagatccaaacagttggccaaaaacttggaaaggtttttcatggattgaccaattcatggattgaccaaacaaaggccaccaagccgccaggtcgctgatgagatatatgtctgttctatgggtgtactaatcgatacaactcttgtttcgtatggcgccttttaacaatccgtcttactcgtcgtctatgggttgctcttcttcaagcatgcgaattagtctgacgtggatatctgtggaatcatcgcctcgcaggacgtcggacaggaatgtcgtttcgacctgcatttgtatctgcagagttcagtgaagccaagtgatcagcgcaaaggttctatcgactgcctaggtggccggaaatctaaactcccaccatttctagacagccacgtatcacgccacagtaaatgttgctgaaccatagaccttcttcttgtccgcccacctctcccgtcgcccatttggtcctcactggccccgcttggggttttcctttcgtgccgacagcgtcttttggtaactccgcaaactccgccaaggggttttcgtcgaaagtgaggacgaattcagtcggacccttcgacccagaggaggtcgaggcggactgattgttggcttgtggaaaagagattgtcggggcgatgttcaagaacgatttgaaacctacctgaattttcggggttgtctcagcaaagcggcaagtcgcgtcgcatctcaatcgtcttactttcgagatgacctcggcagtctcgcggaagtcaccacatcggggcattgacgttcgggctaggaaatcttcaatgagacgtgtcccgatattgtaccccctgagagtatggcaaaacaagcatagaaaggagatgggttaggactgctcttcgtttacaccttcgggcagactctggcaggcgagatcggggtggaaacggagagctcacattttgtccagttgcttattgacctcgccgtaatcctcatagtccttgatgagttgaacgaccagtgcgccatatgtcaagctaaaaagctcggcgttctatggcaaaatagaaaggcgtgttaggcgttccaatactgtcacgaaggctgagctcttgacggcccgaaatcggagaatactcacgactttctccgttcgattcttccattgatcttcctgcaagaccgaagtctaggtgagcagatgatcctttgcgaccccggaacatcgctgcacgaaactaaccccgagtgctttatagtgtttcgcattggcagctgctaccgacatcttggagagtttgcgacgataggtttatggctgggttcggattgtatgtgggttacaaaaggcggaatcgagatggcgagaccttgtgagcaggacgactagccatggccatcatgtatgtttatcctgcaacctcttaaccatgttcgtccttctcttccgggatcaacgaaccccggccccggtcagcgtcgaaggtgcaagggtgtgtgtgtggtctagtgatctccaccatcgtgaaaacgcataaaggatccctagtagatcactgagggggatatggatttatgcgttatcaaagtgtttgaagtggaggtaggtcaatcaaaagttcgaacggacagagccgaacatgtgtgggataatcctagggacatcagatatctttatgaatttatggaaagcatagcatctcgttatttattcaaaggctttctcttcctcaggttcacgacgacgctgatctcgctgtagcactagtagcaacagccgattccctctcatcaagcctagcactatttcgacaacgaaaggaacaacttctagtccacaatcatgtcgagaccagaggagatcgccccgccagaaatcgtaagctcacggttgctcctcagaaacgctcgggatcgtttggttttctttgggctgatatcgcttgacttgaaatgtatcaacaaaagttttatggggatatcgaggcaaagaaatataccgccaagtaggtcgaccgctctcgcctcgctcaaatggcaatgcatcatattgaccaactgaaccttgtccttagcactcgtatccaaaatattcaggctcagatgactgatcgagcacttgaactattggcactgggggatgatgaagccaagtttctcctcgacatcggttgtggctctggattgagcggcgagatcctcgatgaagacgggcattattgggttggagtcgatgtctcacccagcatgctggaggtggccgtcgagagagaagtcgaaggggatctctttcttcaagacatcggtcagggattcggatttcgacccggtacattcgacggggcaatcaggtgagtttgacaagagtacgagtctcatcatggtcagcaagctgagtcgtgcacctgtttcagcatttcggttttgcagtggctgctcaatgcggattctgcagcccattctccggctcagcggatcactcgcttctttacgacactccacggctgcctcagaaatccgtctcgtgcggtcttccaattctatccttcctccgacgatcaagtgcacatgttgaccacgtgcgcccagcgggctggtttcggaggaggtgtcgtggtcgattatcccaactcgaccaagaagcgaaagatgtacctatgtctgatggtcgggcatcaagaggtgccttcgggtttgactgaaggaatggatgttgaagatgcttcaagtacaaaggtcaagaacgagaagcgtcgcaaggccagagctatggcgagcaagaaaatgaagggcaagaaggcgcttggatctgtcgacaaagactggattctgaaaaagaaggagctgtatcgacagagaaaaggtgtggagcaggtgccaagagattccaaggcgagtctgagcgcgtcgaggcttgagagccgacctccagttctgatcgtccttgtcccccttcgcaacagtttaccggaagaaagagaaagacccgtttttaagttttccagagcgtgtctgctttttggtcgattctctgtcgatttgtcccagtctcaattgtacgatcttagctgtaatacatagatccagaaacgccaacgacgtggtagggttactggtcgaaatcttcggcttctacaaaagctcccccgctccactcgccctcccaatctattgtgacggactgtctgcttgtcgtttggtcattcggcgggtcatgcccctctggctgtccttcaagcgtcgagttgtacggctctcgagcaccgcgtccttctgcataatacggtgcctcattcgaaggtgttccagatgacagttcttccaccctttttaagatatggtagtcttcgttcaacgcagcctcgagcgttgcaggatagtcggatcccctaaccccgtcagcaaggtcaacagcaatcatcggttcgcttgccttgagagagcgaggctcctcttctaccgctcggtcccgctgatccgtcaaaggtggcgagggacggcggttggtatcgaggctgttttgggcgtctccagtattcataagtcgagacgactcgtgactaccttgatcgatcctaagattaaatccgctggggagaggggtcatgacatccgcttctggggtataaggtgattcacggttcgctatccaggttccccgagcgcgccgcttgtccaccacgtcgagagaggtggccatgctgtgaccttccacttctatcttgcggggacctagtcccagccgtccgtactcttcctcgggaagtgttcgtttcccaaggcgacgcaaggaccgtagacgctgcatcaatgcgagcctatgcgcctgttcttgacgaagatacaagacggctacatggccagcggggatgatgagcatgtgtcggatgtccacgaacggtcgggctcactttgctgtagcactacactctcactacgtggtccctgtctgccatccgtcacttcacttcccggctgcctcactagaggcaatatagacagaacgccaggtcgtatcggtttgccgtgctcatcatactgctggccatgaggataggatttgggatgcaggacgtgcgcaatgtcaggcgtctctgagtgtttcccggcgctctcccctctcgcctggcgcccacgacgtgcagacgaaagcttggtatccaccggaagcacagaatcgtgtccatttacaccatcgcctggcaatctgccagtcctggtggatctagcacctccgcctcccggtccgctaccccctctacccttgccctccttgagttcggcatcacgaagagccggaatgacccgatacaaggcttcatagccggacttgattgcagctcgacgtttctgttcggccgtgatgtgcgactgttttcgagttgctgtatcggcgggagactgacgtttcgaagcgctatccggcggagcgaaatcgggttgggtatcggccgagacctccctaggccaggcattatgcactgaggcagaacttcgctccggggctgacctttcaagttcatgctcgtttgcagatgtaccttttgttttggtcttcttgatggaacccgaagcggtctttctcctcttggtgggcctttgcaactcctcttccagcagagtcgaagctgtatttaacccttccgttgtctggcttcctgacctgaaatcaaattggtcgaagccagaatccccgtcccctgttcctccgttgtgctctgggtgtgaattgtgacgatccgcctcctccctctccttttcggccaattctattgcttgggcagcaaaggccgcatggatcattgcggatccatcgaagaatgtgacatgattgtgatcgtgatcatcagtatccatctgtggatagctatcatgcgactcgatatcgatcacgtgtggcggcgtatcgttcgttgcagttggatctagatgcagctgcgggtcgagcccatgagcagcatcgttgtggttgtggatctgctcctgcactgcctcagcttgatcgcctccgtcccccatcgcgatatctagtttggatagacgtgtattcagaagtatccggggatcgcagtgttcatatatcactaaaccttggggaatgaccgcaagatggaattgagtagtgtgaagatgcaggtagcttaagtagtcacttgcgctgatcgggtacaggtaaggtgaatgtgtgacgtccaaatcacgtgatctcgatttcgtctcaaccgcgagagccggacaatcatcatccatgactctgacaaagtccccgatgtgtttctcctttgatggcgagcggtttcagagggcagttccgcgcgtttcatgtcatagcgagtcgagacaggccgcctcatatttaagtatgactggaaagatcgtttactcgaagcaagctggatctgatcattccctcgctcccgctttttatcgcacaattgacctggccacctgtttatcctctgatctgtcccccatgaactacccttatccgaacaacggctacgccgccttaccacgcggatacccctatgcctactatgcatacccctatcctgatgcccagacgggtcaggcttactcgtctcatgcttctgcatctagtacaacaaattacctcgcttccaaatggcacgctgggttctctcccggtctcgtcgtgttggttatggctactggtgtcatcggatggtggcaatttggcagggcattcctcgatggagacagctcaaaatagtaggtgggaccgtgttgaatcatcaatgactcccttgttgatgggttgttccagcgagtatgtcaccgccggagtccaggcgggtggcatagtgatacttttaagtatcgctgtcaacctgatcggttctagctcagtaataagccaattggaacttaattatcagcacatgctcatagctctactcgtgtaagcaatctctttccccgtcatacagaggaagacgctcacataggagatcataaattggtgccatatagctgttgcttgctctggaattacgtggccgcaacatcgatgtcaaactcgcggcagtcacaggatgatgatgagactatgggcagatcatcagggacgaaatcttccagtagtaaatcatcctcctcacgagccaccggatcttcgtcctccagatcgagcgcatcagcgataaaagaatcgtcccggacatcctcctcatctagttcatatcgagtagccgacgcttctagtacggcgtctaagcgactttcctcaagttcgacggtagaatcatccaaaagctcaagttcttctggagcggacgctgcaaagccctcaggctccagcaggtcaagcagaaggaaagacgccgtgagcgagaacaaggatgaggagcttgacccttgggagaagtcgcacccgtctgcacacctgtcatcatctcagaaagaaagggcgagactctggccattccccatcggatttgatagagctcgccccgctggtgaacacaaactctggtgggaaagcggtatacctcacatcgttggtagtatcgaagataccgctaaacaaggcggatctagcactgcgtcaagtccgtctggttctgccacagtgcccaccgacgctagcagaactgattcggaaagacgaaaaggaagcagtacatccggtagtaaggaaaggcttaccgagccatctgaatccctcacgatgccgacgaggcccacatcacaatccaactctgacccagggccagattccgccggcatcgatgttgaaaggcgtgaaaagatgaaagcggcttatatgaagatgaagaaacacccaaacgccgatcccgaacttctccgcaagctcaaaaaatcaataatggagaactctgcaacaaggacggatcaggcgaaagatggagcatcgacctcggttcatgatgtgagatcaaatcaggaagaaattgacgttctgactgcacagtacatgaaactcaaggggaacccagcttctgatgctgacgagatgaaacgactcaagcgcgagatcggacgtttgagagaggtacaacgcagcgatgatccgatcggaaaggggccccctcctgctggcagcactcctccccccgctttcggtcaagaccccgcattggccgaccagctcgggcctacgcctaagcccagcaggggcaaagataccggtccggggtccgatgaggagcggcaaaagctgaaggcccgctatatggccatgaagcgtgatcccaatgcggatcccgacgaactgaagcgattgaaagcagcgatcatcgattcaagcaaggcaaacgaagtcaaatctgttgcattcgcacccaaccaggtatgagcgagcatatagtagctatttaggccgagatcttcgctcaacatatccccctcactccttgtggttatgtactcacaaattcagagctgctcagaggatccgcgcagatctcaggcaagtgagatacatagagactcaacctctcgtcccgctccgtccgctcccaatgatcagaaaacccaggtcgcgtgagtcggatgattacgcacagctgaaataatagatcaaactgctgaatcatttgacaacagttccgaagcagtagtgcggaaaaagttacgtcaattgcaaatggccatttgcgttgctgctgtggcgatatgtcagttcctgccggacaacacgcgtcctcgccaccgccaggctaacctctcgagtacctgatgttttgcctcgcagtgaacttacctataggcatactgtgcggtatcggactcacgatttacttactagaggatatgatagcccctgccaccgaggctaccaccgctactgacaattcgccctcgccctcgaatgataacgaagcttccggagaaaagcccacttcgtcctcgagatccagcggtggcaacaaaggggcttccacgtcttcgtcatcggcaagttcgtcaacgtcgtcgaagcgagcgctttcggaatcggaaaaggcagcgttaccgacatcaaccgggagaaacaaagaaaaggggaaaagtgaacggctacctgtaagtctttccgcatgaattgagctgtctgagtggtattttctagactaagaaagggaaacacctcgtccaaatatgaagcccgtctcgatggtgtacatgtccactcccaaccctaagacgccccacgtatggaatggcccggacttccccctagctgtacagggcacatcatcagcacttgtcagctcggtctttaccccttagactcgcagtccgatgacaatgtgtcattgtagtcgatatcgagcctcatagctcttagtacggttaatttgtcttcttgtcgctgccgttcaggctgaccgctcgccagcaggacacctcgtcgtgagctctgtagaaccggtgtcagccgctgcagccgcacgtccgcaaacatactttggtcacgtacagacagatcagcgttgtgattccgcaaatcatgatcatcgccatatccaccacgattccccttcccaaaaaggaggttaagtaccggacgcaaacgccgctcgctgtgatagcgaagatggagagcgtcccaggtctccatcgcaccttgttcctcgatcctagcgctacctttgttagttcggcagcgtgttgaccagcgaaaacaatgcggcatatcatttgcaaggtgttcccatatacgagagatatttcgggattgagccatgtggccgaaagattcgacctttgtaaagcgcggatcccgcgtatctgacgagtgacagccaatgtactagcaaaaacgagagagcaacctgccattactccgctttgacgagctactttgtgcgagttggtggtggcagagaagaaagcttcgagtatcccattgaccgacatgatcggtagatataacgtcatataggcaatgagggtggatggggctgacgtccgtagataccgcggcggcaaaaggtatggcatcaaaatcgagcccacaggcggaacgaatgcagcagtgatgagcgggaacgcgaatgcgatatgaaggaagttggccaaaacttgatatggctgcgtcttgtaagggccgactactgcttcctcagtcctgatcgtccgggaaaagtaaagccgagctgattcttcgagcggttgaaacagtattcgaaccacaagagacgctgccgagttcgaatgcataaaaatatcaaatacggattcgacgccccagtctagccgacttgccataatttgttgccagtgcgtatcccgcttgatctgcgagcggactggtccagcctacgacagctcgatctgcttctgtcaagcagtgcttgaacaaggactgtccagtcagggcgccgagcaaacgtaactgtgtcctctcgaacaatgccgtttgacccttctgcctgtgaatgtcctcgattcgtttagattgctacgtctatcaaccacgacacgtgtgaaaggctgctcacgctgaaatgcgggacaggctgtcccgaagaatagctgatgcttgagtcgccacttcggcgaccgcgccataccctaccgcatgcgtccaggctgcaacgagcacagctgaataggcgagctggccggccgcgaagcccagcaatgcatgaccgtcgctactaccactttgcttcgcaatggatatatacgcaaaggtgatgattgctcgagcaactaccccggatccttcgatgcgggctcgggtagaggaggcgtccagacctgatgtgctgtaaagtccaacctgactgcccagcatgaacggctctacagccagctcaagtatggttgccagaagataaccgcatagcgacaccgcgtagaaggattgggatgtcgtctctctgggtaacaatgacacgtacgctggtactatcgtagaagctactagcagacccaagatgggtggtaggagtgtcaaattcaagatacgcctgcgagtgctagaggcgctcgggtccggtttaagagtccccttgtcctgaccagcgtaatccgggacgtgtgttctcaagactacacctcgaaccgcctctcttcccaagaacagtacggtatctcgaattaggtcaaactggatagccgctgtcccgtatgccgttggcgaagctatccgaatcagagactgattgaggccgaaactggtcagacgagagatcagttgtagacctatcagagagcgtagtgttcctgcatagtgctctagagagctcatagcttcttgttgcctgttgacgctatagatcgcctgacgagcaaggctaggcagtgcttgacttggggcacggtggagagacgagatagaaggcgacgaaagggacggctcgagacgcatgcttctggatatagctggatatctggatgccgcgtgacgcgtcacgcaatctcgcgtcagtagtgaggatgaagcggagacgttgccgcagttggaagaggagcgacaagtaagaatttccgtcgtactctgcgttgatggcctgatggatcatggatgctcgactatctcttgtctgtaaggggtcccctcttttgttcaactttgctgtttggcttgtcatctcagtcagactgtccacgctggctctaccggagattcacccttggatccgtgtatcgccgagaagatgtggagatcgtgatatttgaacaactattgactcaagcacatgctcgttgcgctcctaccttatgattccatgtagccgttccacgccctgacgatcttgttacatgggatcaagctgttgtttgtaggtggtgttgtagaactgtaatggtaacatgtccattctccaaaagataccaaatgcagtctcttgtcaggaaattccttttgagaccgctgcagaaagctgtcaagatcaagatcactttaggagctcttgtcatctgattttgtatgatagatatagtgtagcctactacagtagtatatatacatgggatactcccctctactattccactacagtagtatatatacatgggatactcccctctactattctatgtgatttatcgtgtgaagcgtcttgtaggacttaccaatgcacctgtgaacaaatgcctctgttgtgttccctgtacaacaatggtctgtgatggcaattgcgatccgtgatgtgctcatcaaatggcaacagtatgtgctgagagagatgcttttgcaaagatctgtcgttgtttatttgagaaaggagaagcctggctcaaagcttatgtacaggatctggatgattgccttcgtagttggcatctggtcatttttctgaacaggttatacgtagtggagaccctccaagatgcatcatttgatacgctgacacacgctgacatatgtttctaaggattggtttgagctaaagcccgtctgtatatgtgaatgagtgcatttgtttacagttatgaatagatggataggatatgaagtactagtacattacgtgtactagaccacgctctccccttaagaacagttgggtttctcacaatttgtttgtttggtacttgcagacaacttgatacctccctcgtaataaccttttatctcataaattccttggggcgcccacagcagatgatccttacagtaaggtcagtactagcaatagaaagtcgtggttgtcccgatgtactgagtgacccgtccgggcggatctagctgttaatccacaacaggttgtgaacccagtatttatggaacgatgtcgatatatatacctccataaacgattgatctaccacgaatgcatccggagacatagagctggatttaaagagcctaatacagatgagctactaaactgtgtgaaatgagtctgacaggtactgcagtcaaaaagaacatgaagaaaagttctttgtaaacttagcttgaattaggaacatgggtcaccaatccaagagaatgaaggaatgaacaaagaagagaaagcaacaacgcaccttgaccaaagggcagtaaacaaaacatttgaaagagattgaggaggaatcgtttgcacagctcagtttgaataccacagaatcttatagacggtgacatatgcaatagcattggacaaaaccgtatctgctcggcaaatgcttctgtcctgtccaataacattaacttactgtaggtctgttcaaccgaaatgtacctagtaatacttgacaggatctaccagacaatatcttgcatcatggcagtgtcaagttccaatattatactgattcaggcctagttgtattggaagaaaagcatgatacactgttaatgttgtgaagtaacgaccagatccacaaagattggttacttgctgggtctaggcactatggttggtgctgatgatgccttgttgtgaaaggacgatcaatgttgcttgcataaaagtaaagtagtacatgagaggggggaaggaaataagacccagatggtctcctatatatactattctaatgagcatgtcctcctaatgtccccccagtgtacttgcgactaggcttgttgcgaatttgcgactcagacgcataagtgcgactccagttgcataagcgccactccagtcacaacatgtgatcctagtcacatgttgaccctttgtgcttgagattgcatcctgagcatcacctatgatgtcacagcatgccaatcttcaacagtgaacaggttgcaacattagacttgctgagtagatgatgttttatcagtcttagactatcaaacattcttattgcaaaactatttcccattctgtacctcatgatttgtatcattgagcagatccagcacccaagccaaagccaggagagagtcctggtgtaattacctacaactacttaatgtagaccacgctatcatagcaacgcgacttagccatctgtttactgtcacatcagccgactggaggacttagctttttcagagagattcagaaaaatcttagcaagtggtactggtttttgagaatgattgaaaggtacattgtgcagattgagcttcatggggcgcgtgtcaatcaagctactgggtcaaggaatcaccagtgagaaggggtagaatgaggctaccgttgaagtccaacgtggcagctgtctatattgtgctggccgatatgattaaggtaacattcatgggccagaacatcaagctttgaggtggggacatgtgtcaagtttgaatgaaccaaagattggcgccgcagatgccgatagtcaggtgcggatctgtgccaagttgactgtttaaaagcaatcgaagtgccatgcaagaaggaacatcacagacagcgggattagcaagacaacgttgtatcagacaagaagagaagaagagcagagcaagagaaagtctagctcactcttcaagacaaagatacttcatatgacaacgaggtagactaggacacagagttctggacaactagaactcagaaataaagatacctccggacctctactctcacaataaaacagtgaggtgatctcgtccagctcgactggttgtttcgcttgtccgatccgttgacctttggaagtcaacgtcatatgcgaggcaataaaactcacctttgatgtcatctcagttccacctcagggtgccacttgttacgggaggcgacgcggatccggctcctacgctgccggctttggcacgcgcgttctcgccaccctctcttcgatgaagacaacgcatactcgctcttgtcaaccctctctgctatcgacacaacgcatattggatatcatcaccatgaaagaacaatagcgacatcgacggatattcgacaaagacctcatagcttgacaaccgactacatcaaacaaagacatccggctcagcaaacaatgattcctctttgttaggtgcgtgactctcgaccctcaattcgtttctctttgttccgaattcgcttcaccgttcttagatcgcctattgttctcaactcgcaaggattactctcgttttcatatttatacttggttgaacttgaccaaatctggcagacgacgttcttgtactaggaaggtcaagtcccaatatcgcattctattcacgcctactgacttgcaacaacaccgcatcttcaagacgtattgtgaagaggttacaatacaggacactcactaagcagtagacgtctcaccgctcgtactgactcacgcacttcaccctagttacctatagcgatactgcttccttatctgcacatcaacccggatccgtaccaccccaaccgaattcgcttccagtaaccaaactcggcttgactcctgttgaagactacctacgatctgtaccgataccgcttagatattcatcagacacgacttagcgaagatccgccgtaacactatcaagctttttcattcaaatgattctgaacctctcaagccagatgaccctctaatccctcaggccagacgtcaatggccacattgttaaagacagaagaggcagtattgtaacaataccagatctcagggagagaaaaggtgctcttacagctaaagatgtccgtcttgcagttgtctcaataccaagtctaaggttcttgatgtcttcgttgaataggcaacaagggtagctaagccttgttgaggaaagtcaaaggtggaaggtgaagaagggaatgaaggtaagagtattgaatctggtgtcaaggggtctgagttcctgttagactgccagcagtacagtacttctccgggacttgtaaggtagcacaaggactaatgtatgtgataacggatgatctaaactggtacaaggtaacggggtgatagatagtaggcctccgtacggatgtcctttgtactgctccgccggaggtgttgcgcggggatgccacgccggaggtgccgtgggggtgaaaagcggaggtgacatatgtcgtaccgcgggtggctctaacagttcccataaaagaagagaaaagggatgcctttcctccttctggggactcgtatgtatataccaaagggctagtggtgtgtgtacaagagttgtgactagagtagtcacaaatatgtgactgagttgcaaatgagtgatcacagtcgcatctttacaaatattcacacaaagcaggacacaaagtctaattacaggctggacccacgtccactatcaatgggattgaagattcattgaacacgaaatataaaacgtcagatattggaatagctaattgtctgttgttaacagcaaatttctatggtgtttttcagtcatagaagtgcaagtataggctctgcttttactagcgaatcaatagcaatgaccgcgccataacaaatatagtactataggaacagaaccgtttgactgatgtgatagacgcaagtgaatcgattcaagctcacatgagactatattgttgtgatattggctgctgccaatggtgtgtagccactccttggtagtggttgtagtcactatgtctattgtctctcgtagatgataaatgttgccttgttgtgaaaggatgttcaatgttgcttgcataaaagtaaagtagtacatgagagagggaaaggaaataagacccagatggtctcctatatatactaatctgatgagcatgtcctgctagtgtccttccagtgtacttgcaactaggcttgctgcgaatttgcgactcagacgcataagcgtgactccagtcacaaatgtgtgactctggtcacaacatgagattctagtcacatgttgaccctttgtgcttgagattgcttcctgcatccatgagccaatcatggcatgcctatttgcaacatatatccgtaaatccaatctgaccagatacgaatccaagggcaccattacctttggccaagaaggggctatgtgttagggttaggccttgcctaactcctttttactccacgtgggacttacaccgtaggtctcctgcctgaaacagtaaaacagatgcagcactagttctactacaacggtctacactatgggatatgcgtctctagtgttctaagggcctggtacaaggatctatctaaagagtcaccctcagagtccatcacgtgacaccaccagggagtattcccaggtgacatccattacgatatgttgtggtaagtatccgcagatacgacctattgccctggacggtaacactatgtatatgtccctcatggacgtcaaacagacaaaaaagagtagcaacctgtatattagccttatgccagatgaggggaagaaacaagaagcaggagagacccaagggggcaattcaacttagaaacaaatcaacctgttgggtccaacgtgttggatagccagataggcctgtttatacaactgataagcggtcaaacaagagactgaagataatgtacaggagtgtgatctaaaggtattataactggctaaaacctttcagaggggagccataggcaaagcgtattggtggatatctcctcttgtccctaatgagtacgtgatcgaatttagtggatggagcgagtgacttggattttgaactaataatgcatactgatccacagctttgcacctatcctgagtggtacttttccaataaatacaactttccaccttgacagtgagtaagcttgaataaacatgctttgaattgtccgttaccctacggcagtccgcggcattattcgttctagggcttttgtaccaaggcccctaggccttgcccttgagaatgggacgagcttatcccccacaagaagaagaagggccctgtaactgagcatagtcaaggttacacctcctttgaatgtgttgcttgaaataccggtcacaatatgaccgagtaagagaggaagacaatttagcaggctgttggagagattaaaagcctgagtctaagcaaatccttgtgtgtgtcttttgtcgattcattaagctgttcttgcgcactgaatggtctcaccttcaaagcgccgttgatttcggtctatcttgccgaatgtctgccgaattgcgcaatcttagggtttgctaacccgaggtactaagatgccaagacttgtaagggttgcataatttgcaaacccgtgtcgaggacgcgcttgcatggcagatttgtgaagccaattgctagccagccaagtctttggcaacagcacatccgggcatgtttttcttcctcgaaagatgcgaggggatagtacttggcttcatgactcgtcgctacagcataaattttacaggttacaagatacagggcaaccatatccgcaaaagcatgcgagttgtcaagaccccttttgagaccgttgtcacagggcgagtttggacgtgccgattgcggtaacaactatctcgaatgtcttttgccaaagcctcctggcatgaagcaaatttggcctgctgaccccaactctcgacataggtttctgcttcctgctttgcatatggtaagtaaatggattaggcatttaacaaagcgcagaaccgttgacagtttcacgaatcatcacaacctttgacaactgcaactgtagtcatcacattcgacatatctgcccatttttctgaacagagagatctggagatattacagtattaccatcaaaatcattggacattgcatggctttgcgttcactccttggcacctgcaatagcagcttttcatgcgcccaaattcaatacactccacgctaaaaccggacaacaggacctgtgtgctgtaaccagactagtctatggaaagacaacttgtggggttgctcgtaacacacacacccacacacaatctcactgtgatgcagaatcaggggttcccaaaatcttgaacaccattgctgggggggccatctgaaagagcaagtagatcgtctcctcctgctcaacattgacggtgttgagctgatctggagggacgcaggtccaaaagagaatcaactcccttctaaagcccaataagcagagtgataccttagatcgcaagtgcaatttctctcagaaccatggcaggcggtgtactggcctctccgacagcaaatgcaactactggtaggactagcataagtttgcaaatccaagcaagatgcttctcaatgtattcacttgtgggggccttcccaaatatggtagtttacctgtcttgcggagtatatggcattggcacaagcagttgaggaagcggtgtagctcaacagagtcctgcgggagtagcacttcctcagaaaatatagccaggccactaatagtgcaatactcaaccggctttggcaatagcggtcattgatctcattaccagaggtcaaagcatattgatataggatagcaattcatcctagggatggtaaatattagggctagatcttggctaaggacttgtacctttcgaattccaacctagatctgtacgattaatatttactagcctgctgtaatggtctgtatatatgagatacttctgtgtagagttctatgtgtctacttcaaggggtctttgtaggaattttcccctggcgcccggacctacgtcctgctaaacagcctcagacgtagatacagatagtggcacattttgaatgtcaccagtgagtagtgttcacatcacctttcactattgccaaaatcaagatcaggcagctgacatgcttgcacataagcccaatggacgatcaacacaaggttagcattgcctgccattgtccactctgcgcattgatgtcctctgcgtgatgaccaaggaacgtaacatgtgagggtaggcataggtgatatcatatcatcaaggtgtctgccaatttgctgttcttgctctttgttaccgctcaggtcataggcggcgggtcacccctgggaacacgtcacatgaggtgctggatgtggtgtctgagggaatgcccccagtgaaagtctgtctgtggttgttccattgtactgcaatgttacggatgccttacaatgactcccacctttgctcctctcccgcttacttctctggtggaaccttctgatagaacgttcccctcaacactcctggtcggtagaattgtcaattcacagtatcacgctttagccaaaggagggactgggtggacaatatcagaggcaaagagaaacaagttgacttggcaaacagattggatttgggaagtctgccctgtaggctagttggatgccactgttgacatacagcaagaaggtgtgtagagtgacaagatgttaaggaaagaactgaagatagagtacaagaataagtaaaatatgatggcagtttctaagagggagaattctgtgaaaaagtacaaaaaccagtgtgatctgagatgcatatatacatctagggatttgagagcgaggtcggaggcttattggcaagctttgtctcttatatttcaaagaggtatatgatcagaagtgggatgatgtgattgactcagtttggcaagcaagaaaagcaaacacaactcttaagagggaacaaacctgtcagcaccatgaatcaaatagctgtgagatctggagcaagcaggagcaagcaatccagcaaatggcatagaaagcggagcaaacatggtctgggaggtgaccaggcctgcacataatatcataatgaatcaccacaatccgcccattcaggaacctgacactgtgtttggcttatctacctgatctgactgaagctggggctcttcctgcaatgaaacatgatagtatacacaatcggcgagtacagtacacagatccaattcccaccaatagcctgcatcaagtcctagaattcaggggcaaaatccttaggtgcgaccatcttgtactattcaacccaaaatcatgctgcaaagcacacaggcatatagagaggcgcaattctgcgaagaattaaatgtcttgtacttctgaaggatccatgcttcatcctcaaatccagcataacagaggccttgtcacaagagacagcttaaaggggacatgaagacacaagcaactcgatattatggctcacaattcccacacttcctcgcacatcactgcacggtggtggttacacgtcataggtttgcacgcgcacgcacactaagttttgatgggactctgcaatgataaaaatatcatcgaatgtccgcaacacctctcaagtcctttgtaccacaatctgcaactgcaaagcccgcttgcaaaccgtccgtaacacaaagatccgccagtgtttagccaagctgcgcaagctgacggacgatctcgctaatccctgaaagaagaagcctcgtctttgccgtgagcttaaaactgaacccccctcctagtcactccagctttgagtgggttccgtctcgcagcaccagcctatgcattctcatgcgtcagtcaccaagttgacatcagtcaatcaagctgatatatgtttagggggggaacacaggttacactctgctctctcatgaaagactcgaggcgagtaaaccccctgacagacactagcgaggacaatgggcactcgatgtgcttcttgaaacgccggatgttcgctgcccaatatattgtagaggccagtctcttcatgaggctctcgctcagcgccatagtacatgctcatagtatttcgcgttttgctattagcgtttcccatctttcgccaatatgaactttaggtatcgacacttccacctaggtagccagatcagatgagcaaagaagatgccattgcacatacgagaccgctctctgcacttaccttcttcttgaatgttgtggtagaaacctctgcaggtttaaaggcaccgtacaggggggacaaattgacatccgtatcaccattgatacacaggtggatctagcacaacacggtagaaagctgtcagtccgagacttacgcagacttcgatgaaccgtgattgtacataccccgtcatcgctgcagctcaattgtatggtcgaagctttcttcttatggatcacgaccacaacctcactgtcggtttgcgtgaagtcatagctgtttgaaggagaattagcggcagcaaaggctgtaaagcaatggcacacgaaaagctcacactgttgagtcagcagcaccttcagcaacatcgttcccggcataaactgctggctgctcgctttcaagttttgacacgtgcccgttggctgcgttcaagccatcttctggatgtgcctctcgcaaaccgtcatcattggggccggaatcgatggatgtagtagaagctgtgttgttgtcggcttccatgcgctgcactctgtcaacactagtccactcggactggctatctacgtgctctgccggggccttctcgtccgcaggtttcacgtcctggagctggaccgccatggaactttcatccgtatgttgaccttgttcgttgtcggcagaatcgctcacggcatccattaatgactcgcgatgatcgcgaagccactgctcgagttggaattttgcttcatccagatctgtgataccgactttgacgttctccgtggatgggtacaccacttcttgcatggcggaaagcaaatagggaaacacaatgcctaacatggcatcggccgcggctaccaatattcgtcgagtctccgtagtacgagcacgatcttgctcgagtaattgcccttgattggaaatgctagtgtttcgtctcatcgagtcaggccgcttgtacgatggtttcaagcgatcttctgtcataccacgggcatagttgaggaagtgcccggtcaggcgctgaagcgatccgataagagcttcattcacgttgtatcggctcctagttggcgccaacagccgcaaagaattcagtgttgaaagcccgtgattaagataaatggcgagcggcgggaacgaagctaggtatgtaggaggcgtcggaggcggtcgtaatttgggacgctttggcggggaagaggcgtccgatatgatggacctcctcccttcttccgaacacagccaagagcctggtagcaactccaatttgacggcttcctcaaatttatccgctacttgtttggttgccagttgccaaccggtcgcgacaagcgactcaatcgctttttcgaagggattccgcagaagcgctgtaaaatcgatacccatcctggcgaaagacattgtgctgtatccgagttgcgttaacaaggatgacaaggaagaggagtcttgaatgccagacagactctcgtcgattacggtcgtcatgtgaagcacattgtgctggacgtaacgagcaatcagatcgagtgcaccctcgtccctgtacccgccggaaaggcctggcccgttgttcatgaaaatcgagttgtattgcgagacggtctcgtatacgatctcgcgaaataggtctatgtaccgacgaaggtatcggattttgtcggccctttcgctctgcaatccctcgatcgtattgcgcatgtgatcgactcggctctccaaaaagacgatgcgaagctcctcttccgacagcctgtccatccgccggagaaagccgatcgttttagccattaccggcagcttgatcgaatctcgtagcaagccgaggagttgagacagctgcatgtccatcacagagtcgatggaacgagcgacagattgcacaatgggaaggtctgggtaccgttgcgcgacgccgttgatatgtgttgccagctccatcgcctcctggtagtacccgttccgcacgcaggtatcgactagttgaggcacctccaagatatccagcagtgaatctcgttgatccaatatgactgatgctctctcccggtcagattgtattcctcgagtggatttggcgaacgataggcattcatcctcgagttccgggatagcctcaaagagatcgtcgagagaagcagaaaagtcatccagcgccgcagaaacggaagccgagcaggcatgcacatcgataaacgtcttgctttcccgagagcatagccccgtcagctctctctgcacgaaatctgcctcatcagcgatcctagatggttctgaattgagagaagccaaagaatatcctgccagccgactgaggtactcgttggatgctttggatccgcgaagaccatcctggcttccaggcagatcgggctgcagaacagcgaagaagtgatttccttggtctatccagcatgaatacattccgcggaggtatcagctttccttgctttatctcagtcgagtcagccgcaatcacctatcatggtttgctcgtcgatctccgatgaccgctgcgtgctgaatcctccctgaattagggttcagctttcgactacagcgtgcggtcgaaggcagggaaggaagcaaatgcagctcaggaagacatgaacgtcagctcatggatgacggtgaccgaatgcaatttacgtgatgaaactatagagcattatgatgcagtagtgaaataccaagccggctgatagagggatcacggaaccgctggatgttgagattgaatagcatccgagggaccggtagcagatcatcggaaccatatcacagtcaggcgccactcggttgcatgaaatcagaatatcccttgagccagtcgacatcgttgatagcggcaaaacagccatcctgcactcaacgggatcgctatcgagggtctagatcggtagatatataagtacagtttcttaattttcgatgtcggtgattcgtaaactctgcttacatatacgctatgacgccgattcggactttgtcctctccagcacctagtatcgttgccggtaagacaggagtccaaatcattgctatcatcagactcagtcctggtggtataaccgacaggtaggtatgtctctttgagtcgaggggttttggtttcgacgaatcatgacgctccaaatgcggcctgagcaggacgaacagggtgcagagcccacacgctaaccccactatatcgatcctagaataagtaccctgcgtaaacttgtcacaatccttaggacctacataagcccgaaatgaaagcaaatataggtgccagagctagtcttgttgaagcctgaagttgagatggctgcttccagggaaggctcgacgtgcaactacagacggcggtataacatgccatcagcggcatcttttggactataaacggaaagcctacttcactcactgcagcgaatcttcggcttggaaacagcattcccaggtactagcaatctcatagcccttatcccacagcggtaattcacttcggctcaccaacggtgacataaagcaaaggatggccgtcaaggccagtgtgtaggagccagcactgtatcggtatatctttgtttgtgctcgcatggcagaccgttgatgagaggtgcaggtgactataaactttgcacaggatggtatgaatcgccaagcagggatctcatttgacaggctgagcccggtttgaaacactttcagcgcgttgcagcgacacataacgggacagaaagcaaggcaaatcttgacaaaggaattgcaactataacggaacatcattcgtttgcaaccactttatgggcctcacgaggactgcgaaaatatgggacggacgagacgagattttcttcctcaggcgacgtaaaaataccggtgatctcgacgaggtctctataaaatattaaattctagcacaggtcgtcgtgcttgttggctgtccgctagcgagctggtagaacccgcatcaccgtcttttacctctgccggcgcgggaagcttttagttgctaccgaggcaccaggcgatatctccgagtccgaactcttgccatgcatatgaccaatcaatcacttagcgctgcagcgggagccgatgccgatgccgatgcccaccgaacgctaccgtcctgcggtatcgcgagtggttgatcccagtgccgtcgcgatagatggactgtaaattggacgaagagcgacaatgtgggagcctctcagatccaagccatcaagtcacgtgtctttgcgaggtcggccttcggacagctggacctgcggtcggtcctcgctgcagaaaggacccatattgtgtcgtcgagccggttgatgggcgaccagtcatcttgtcaagggacgacgacgtcctcggcgaggtagtatctcctggactacgccgcgttcaacaacccgacgataggatagcagcaaccggcgtgcgactttctaccactgtgaaaattaagtccatgaagtccgcgcggtcagtttcgcgagttggggacaaggtttatcccggcttgtttgcccctcgtctaaaagcctaggaaatggccatgagactgactacctaaggtcatcgacgtgtatgcctctgtttcatgtagaaccgtaacgaaagcatcgtattgcggcagttcagtatcagggcgactgcgcagagtgtttacagtagtgacaactcaggtcgggaatgctttccccatggaaggctttccaactagggcactgggacaggggatcgcaagtgtacaggaatcctcattggaaagacaagtgagtgtctagcggcatttttctcgccgaggcgggatccatagcgcccaaagagccataaaaaacggaacggaagccatattatcgtcgacgtacttcgtgctccatcatacaccttactgcgacgtcccctttcgactacagtccttcagcggaagatgtaccggtctgagatctgtcgtcttctgagccggaaagacagggcggttcacccgacctgtcgatgctttcttatgacagccggaccgtttacaaagggcaggatcggctgcgtccgagcttgggtgccacgttaagcgaacctataatgctctcgacactgacgtaatgtatgttcttcttgcagatgtacggggttcatcctctttttgatagtactttcccactgttacgattcaacatcaagcctcaatatacgtcaagctttgagtagcagactttttggtcgctcggagctggtcgcgattggcgcatgtttccttgcaatcttaatggcaatgaactgagttggtgaatcgctatggcacagcttactagccgtcaacaatatgatgtccgtatccttttgatgtagcacaagtgtggcgattgaaagagagagcaacgaatcgcctggatacagctggtgcgcttcgttttggccatacgattgatcgttgttcgcactagtcgcacgaatgcacgtaccgcgagctgcaatacgaccagaattgacgtggaggatcggaaggtcgcggtttctcgttcgtgtcgtggttgacgcaagcaaccgaactacgccctggattgaaccgtcgtgttccagccgtggcgtatcgcccgcgtaagcctgcgatcgatttgctgacgtcatcctttttgcacgaaccccgaggctgttcccagaattcccataaaaatggcttgttccactgagaatgttgagtggtccgttaactttgttccgtcttgcaccgtcgcaccgtatggtcctacccgcggatggtcaatcccattctatagcggacaactgactttctacccagccccaggtgcgatcttgagcacgtttttcgctatctagaggctccatgttcgctgcatctcctgccgtactgctgccacacatcaaggctgcatccgtggacgggattgtccaattgctttgcagagtacgtgaccatcgctgacaaatgtaggtatatgtctcatcggcaacaccgtgaactgaccaattcgacgcgttgttgttcgtcaggctcgatgcagatggcgattcgggtttgtggtccacggatttgacgagaagaggctctacgcggaaatagcgaccaagcgcgagaaaaaagggctcctcaaattccagcgaacgcgttttgtctgtggtgggaaacaaaaccgtgcagggatttcagcgttcgatgatatccccaagattcggatcgggtgctggtaagtccactcacaagacaagacgacttctggaccgccgaccggctggtttgatgtatcgcttacgtaagaaaagggcggcattgttacttgcagtagcgttcgtaggagtgacggatacaagtgtgggaaataaacctgtcgacagcttaccaatcagcaaatggtgcgagagtcttctaaatgagatagagctcaccagatctatcaacagcacgtgggacaggcacctcttttccgaagcaagccgtcttgcgagctggtcacccatgtcgagatcaccccaagccagtggtatcacatctacatcgactcgtgttcctcgatccgttccgtcgtgctgatttcgccacctctcaatattgcgtgtgcacaggggaatcacgtctggcaaatcgctcagaaagactttgggtacgatcgcctttcctgcttgcgttaggggtgcgggataagcaaactggtccaaaaggtgaatcgtcgccattgattgtccggagccgagctctaatatcgtaatgggcgtctcactactcagcgatccttcaatctcaattgacggaaatatagtggaggctggagagaaatggtaagaagctggatgacgtggtcggctcagatatggcagaatggggtacgaagcatccctggatagttgcgcaagatggtatcagctatatgatatatagcagtctatgcacaaaaagggctcaccaaactcgaccagctataccatacgacaggattgcttcgttctgcccaaattcatctacatcgccttcgtctgccgtatgatcgcgcttcgacgggccgattgctagatttaccgggaagtttgggtgtcgcgacggatcagacatattccgcaatgacggcgaagcttgccggagtatctggtaggatgctcgggacgaatggtagtcccccccttgatcaggatacgcggctaaactatgcgctcccgctgtacaaggttgagagtgcctttgagcctttgttgcaaaggctctgttcgtaccgatagccaccgatcccttttccagatcgtggcggattgactagcaaacaactgggaagtggaacagacttaaagtctgctattggtgaacctgtcggtcggatcgcagttcagccggtttgtcagtcgaccgccggtcgagttgatcgttgaggacgtagtagggcctcgatcgcgatatgactcatcgacccagaacccggccatcacctagcacgtggcgttgcgtcgaccgggaaaggtctgtcaacaaacaaaacaataataatacgaggaccagaactgcatagccacgagccagggtcgcaagacccggactaacggatcgactcgcgactcggaatatatggataacgttatgtgtagctagctggaaggacccacatcgcatcttggaagtgtacatactggtacaatgagctcggatcgaatgattattgtactaattgaatcatccaactgtcgacttcgggaaggcctgtgagaggcatctttcacgtgattgggttccccaatcgtctggtcgcgcagctttgccttacttccgatcgtgatatgtgtaagcgcgacgatactttgcgcttctagatgaagtacccattgccgcgttcgcgacaggaggggggatttcgcgtggagcgtggccgtagactcttcgtccatccgtctgtccgtctgggtttggttgacactgtgtggccagctctgggagaggggctggccgcttgctacctgcttgcacgctcatccacccagcttagtcgtggggcgacacttcctggccgcggcgggtcgagcgagacaacccacgaacggagcgagcgagcgaggatctcgacgactaggacatcctaatcgaatctagacctcttcagactgacaaacactttcaaaccgagatctttctccgttcgtcttttcggtaattccccaaaccacgacatttcgacaaccttgaaatcgaccaaagtaagcgtcagggatttgattctatttgcgagagcgagagacggcagattggacatgttgctggatcaaaacggacaaccaggacgggtcaatcgacaacatcccgaacatagcacgtcgggatattagtgaaaagcacaattggagtggtcagggacaggttccgacacagacgaatcagacagattgaagtcgacaacaagtttacccgactggacgtcatttgccgagagatctcgactaggcaggacagtcttgagaagagcatgctcgaatggttacgcttgaccgtggtggaggacttgactcgcacagccactgctggatccggctcgccgccagggctatcaacgatgtttggctgtagcgatcgtcgccatctaccgttagactacaccacatgcgaaatgcggcaagcaataaccttgaccatcgccagccagcaatcgtctcgtcactcccgagaagcaacaatgttccctttgccgtctcgacctcaaaaccgcctattattgcctcagacgactgacctaagctataacctttttacagatggccaggtccgctcctatcgctcccaacgtcggacgtttgtctcgttcgcagctcgctgctaagaggggtctctacaagggtgagtgtgcggaggtgcaatcgcatgcgactcggctgctgggctgcttgctgaaactgtgcgacttcaccaggcaagaagaccggcaccgcccccgccaaggaggagaagcccgccaccgtcgagaagtcgatcggaggtgccaagaacggcgagaagaggactatctcgaccgacaaggcctccaagtactaccctgtgcgtttcgactggtcttcaaatgtctcaccgaactctagcttacacgatgtactgcatgtcacaggctgaggatgttcgcaagcccaaggtctcccgaaaggcccccggcaccactcagctccgatcttcgatcacccccggaaccgtcttgatcttgttggctggacgattcaggggaaagagggtcgttttcttgaagcaattggacagcggtctgttgctcgttagcggacctttcaggctcaacggagtccccctccgacgagtcggccaggcctacgtcattgccacctcgaccaaggtcgacctcgctggtgtctcggtccccgagaccgtcaacgacgcctacttcaccaagtccaaggccggaaaggagggcaaggaggaccagttcttcggtgacaacaaggagaagaagctcttgtcggacgacaggaagagcgagcagaaggtgcgtagatgtagtcagccacgactttcgatttcgtcgcgaaactaatcatcctgccccaattaatctctaacgtagaccgttgatgccgccctcctcgccaacattaagaaggttgacaacctctccaagtacttgaagtccaccttcagcctttccaggggtgacaaggttcacgagctcaagttctaagcgagaaaagagaagaggcacgaacatggagtctgagggatgaagacttgtagagatgggcagaatctcgtcatcgaggatcaggacgatccgagaaccaccttgtaaccttcggttgcgcatgctattcgctatcaatcgtagcgataaaagagaccttgtgcttgagctcgacattggcaggcttggttatcacaaccctctccggccagacctggtcgggaactttgctggctgatcaacataatctttcgcatcatatatccccgacctcgctagattacaaggcgcatgaagacaccacgatttaccgaacgaaacatctattgcaaagggtgccttgtatggctgacacgatgagcgtgcactatgccatctcttagaccgtctcgacattcccatactcgctgaccagaacggaaggatgaatggacgcatcagcgtgtggtcggtcaggccaatgagccgtgggttgttctgggtatttcgactcacctctcgagaccgggctccatcaagctcgcatgtcccatgatgaggatagagctggagccaacaagccagaagagagtgctaaggggggcggcgatccagagcagagggatgcctacaattcgaatggatgaccagatgataataattggacgtcagcgtttcccttcaaggcgggagacccaagctcatactaaccgatgacaaagagaccggtgtagagcgacttttgggttacgacgtggtcgcccacttgcattggctcaggagctgtatcaaacgatgtgcatgtgtcagatgacaggctagggagatggatcttcttgcaaagactaaccgaatcggttgatagcggcaaacccgccgatgaggaagacgagcgcgatcaagagcgccaggttggtgagactgaacaggcgggtccggacagaatggtatcagaggtcgacgctgttttggaacgccctcgacgagttgacttacagagcatagacagccagcagggcgatgacgatcccatagttgccagagaagtatcgggtgttgtaagagattcgctagaggtcatcccggaggtaaaacgcgattagcttgtcgaccaagcaaagatgaaggcatactgtcatcctccacactcaccgatgtcgcctcgttcatgtcggcgggcttggacagcctttggtggtcgaactgtgattcggtcgcaatggtgagcgtccgaatgattgacattttgaaattacgtccgactcacaaactcattgacgggtcgaagtgccgacagtcgggtttcctacaaatcgaagcagatccgcaacggataagcagcgtcacacaaaaaaatcaaacctaggagaggtgacctacccggaactgtttggccaattcgggaatcctggtcaagttgcctacgacgtccatttctacggctgtgtaaagggggaacctcctgatcagtcgcgtgtcgagcaagtggtagttgaagcgacggcgtacttcaagagttcactgtactgcggatctgagggttgtaaggatctgaaaatgtggtaccaagtctgtctttagggcaatagctctgaggttgacgactagtctgttagaaaaagactttgggggaaagagagggatttatttatttatttatttctgagttgcttgctttagatacagcagttgcagtcgtcgttatgagaagaatcttcccccggatggatggtccggacgcttctttgagttttgctttcttcgcctcgctgtgctggcctggcctggcccggtgctagctagctagagcgtgctggggctaaagctacgcgctgtgtgtgcctgaggggatgccggaaatgggaatacggggcaaatgggattctcagcaaggcaggtgagctgcctagcaatagacagactcatggcggcgacacccatcgatatgtaccatgaagccatcgtcaccctctttccaactcagccctgaccttgcagctttcacgccaaagcaaacagatccaaacgtagagggcgacgctgtaaactgggtcgctcactcgttcgtggtcgggcgagtcgcgcgcgtcaaagaggcgattagtcacaattccgccagcgaccaggctcgggctgcttctctctctctcacgcatcggatccgatagaccaagaccaaacatcatcatcatcatctcttcatcagttctacatcgaaccatcgccgtatcttccgtgatggccaattccctcacaatctaatactagcacattcaagtctatctagcccaaagtatcaaatcgattcagacaaaaagcctactctatcgctttggcttgacccgggatgggtaacactccatcgaaccagtccgggcagggaccgtcaggtaacactgctagccctacccgtcgaggatctacaagtgcccacggtctgcgttcgtcgcccgcgcagccttctcgttctcaggtccataacgtcctgccgcatagacagcatgtagggcgccatcagcagggtcaacggtcggacggtacacagggatctaccgcgtccatccatcagacctcttcatcaccttcctccaatcgccctgtttctcctcgacgacgcaaatcgctggagctgccagatctcaacaacaagctcacattcaccaacgccaacgcgcaagggggaggactagaacagacccatgctgagactgtcgagacgcaaatagcggctggctccggtcgggtccgctcacctctagcaggcccaccgccgtcctcctttgcatatgacgaggaaagttcgctcggaaacactccagcaaatagcaaacggactagcctgacctcgggaacgcgggcccgatcaccacaggcgagcaatgctggcattacatcttctctaggcgagggaatgaattgcggagcgagtgggacgagtatgggcgcaagggaaggcatgcccatcccgggagccaagccagctcgacgtgtcattaccgccgcagatgaatcggacaatccatatttcccacccgtcgccaagcagcgcccacctgtcactccgggactacccaattactcgcatagtccccacaccggcaatgatggctcgggagtcggcctcgcgcacgtcgagcacgctgagcaggctgagtatgactttgtaggtcgtgacagactctcggtcaacacaaacatccctccgactggggcacgacaaccttcgcctgcgagaccggccccggccgtggtgaccaccgaacatcatcatatggtctcacctccggacgtcctcgtatccgcgttgccacacggtatgatcggcccagccggaacggaccaggataatcagcttgcgcctgcaattcaaactcccttggcttccctacaaacacccctcgctctagaccccaatcagacgccgttgggcatgcctcctggtgccggaaatgagggccgagccttggaagaagaagaagagaccgcgtccgtgccaactcttgtgacttggaacgagggaggcagaaacgtgtatgtgacgggaacctttgcggataacggatggaaggcgaggctaaagatgaacaagaggtcagtccgtgtcggatctcgcaaggtagcgagcaatagcactaatcgttttggagcctctatatcgtttagtacacatgacttttctctcttgctcaacttgccacccggcacgcaccgcctgaaattcatcgtcgatgaccattggaggtgcagtagcgagttgcaaacggctacagacggagacggaaatctagtcaattggctcgaggtgagatcgccccccgtgcatcaaaggtggaaagcacattgtcctgattaccgacgcgaactcgtttctcttaggtggagccgcccaagaaacagatcgattcgcatgaagactgggctatggcggaatgggctcagaaagtcagtggcgccgaaatggagcaaggtcagtcgaatcacttggcacgttaccaatatcgacccatagtacacaagctgatccgacctggtgtccctttcgatagatgacggatcgctgtggacaaatgtcattccgcccgcgctggtcaacttcatctcgatcgaagaacgcggcaaggacgagcctcctgaaggaatgacccaaggcgcgtttgacaagtaccaccaaaccctacagcagctgcttgcgaccgtgccggctccgcccaccgtgccgcgtcatcttaaagaccctattttgaacacgagcccgaaagaactcgagggcaccatcgggggcacggctggagacgacaactcaatcctccccgttccgaatcacgtcgtactcaatcacttgacggccgcggccatcaggaatggcactctagctgtcggaacgactacgcgatacaagcgcaaggtgagagatggcagctacctgcgcatggcgtagtgcgttcacgatgactgatgaccatcacttggctctgttggcagtacatttccacgctcctattcaaaccggtcggcgatcattaagcttcttgccaatcggtcccggcatatctgtatccctcgcttcacatacaacgtcttcacttgccgagctgaacagtcgaaatatcgattgtatactgcacccgataacagacgagattcaagatcgaattaagaacttcgccaaaagaaaggcgtctacctgttgtatatatccatccattgacgaaattgttggagccatcccggcattcgtcgagcatcgtatcatgtcaatcgatgttcgccacgaccatgacactgggcctcattccaccgaccaatctgccgtgatgttcgcaaggggaccgggaatttgagatccgtccgatcaaacgagcttgcgacccggagccgcagctgtaacagatgcgaagctcctgcatcatcccgattacgcgtgtgagacgcttcgaaattgaacgaaaccatttcggacgatcgggcgttcggtcattacagagctgaaggggcggatgacacaagcgccaggaaggcgtttcatgacatgtgagccacaaccaggggtcaggggagattgaaactaagtcgaggaacgcggtaccgtgaaaggagtgtgtgcttcgctgaagcccgtgaaaggaggacatccagccatccggaaggagccaatatttacttccgccgtttactcctggccaccacccaccggccttcggtcacgcgcaagcgagagagcgagaagagcggcggatctttccgtgctgtgcccgaggtcgctcagttgtgcatcgcatcccctcctcccctagcgatttggctgtcagcccattcactaaccacttcgactgctcctttcgaaactgcagggatacgcaatgtgctggaggatacaggaaatgtaggtatataagacccggacgaaacaacgtctatcgacattccgtcctcctcatttacgggaatatctacaactacccgtctttacttttaactactccgctgcatatatcatcgctcgcgtctgaagatgctcaagatctttaaaagaaacccggtggagctgtgctctgtactcattcttctggctgggctcggccaggctagtcctgtggacctcgaggtgagatcatccctcatcacgtcgcctacagaccacatggctgactgatcggcatcatcgtgttatagtcgcgacaaacaaatccttctaccgtcaagaggaacctcacattgtccgatacgatcatctacgatcttgacaatccaaatatctcctatcctatcgtcacttcgacccatgggatcagtgttacctcgaacatctacgtagtcgacggagataacacttctaatcggaccatgtgagcacgcttggaagtcggttgtatggaatgtgcatgggattgattatcgatttgggctcgttgattcaaagtgcggaatacaaggccgcgggcaagaccgtcatgtgctacttttcggcagggtcctttgagcctttccggtaagttgatgggtcaacgacatgcgcgatcattccgtatcccttgctcaccgcaacctctctgcgcacacaacgagaatagtgacgacgccgccctcttcaagtcggactgtttctgtggcaaaggatccacctacaacgccaagactcagaaatgttcgtctagcaagaacaagatggacgggtggaacgagtactggttggacatacgtactcctgcttgtttgaccaacatcaaggggattcaggaggccaggatgaagaagttcaagcagaagggatgtgatggggtcgacccggataacgttgatagcgtcagttgcgaggaagatcgaaatatttctcgcacctcgagatagaggaagctaatgctgagttttactcaatgacagtacatcaacagccagaagtacggcacgaccaaggcaaatcaagcagcctatcttacgtgagtgataacgcgagttcatccgacgtgctgctatcgctgaccttgattccgtgctcacagctggttatctcagaccgctcgaggtctaggtctgtacatcgacttgaagaattcgggagatatcttggaagattaccctcagatcgttgatatgttcgacttcagcgtcatcgagtcctgcgtgagtgcgcgttgaaatgcaattagcagcacaacgggagtatcattgacacctgactggtccgatcgatagtacgtctgggatgagtgcgacgtttaccagccgttcttgaatgccaagaaaccccagatccgggtcgagtacgggtcggacattaccagttgcagcggtctgaagctttctccgggagttacgtttgctcagtacgatgaggattcattggacaccaagaccatcaacctagcttgttctggcggcgcgcccaagtagaatgctttttaagacaatgcgtcgttaggggtcctggcggctctacatgaatttcctcaccacggttgatccgttcgagatgcgacgcatgatgcctatcatcggtctcgacctacagactttcgcatccgctcactcgggcaatgtcgtcatggggctttctgttttgttccgtcgcgtcgctctcacccgacgggactctcctgtgtccctgcgcccactgcccccttcccctgcctgtgcgccgcgcccccttgagcgcttgcccgcctgtgacgaatctgccccgcgcgcgagtcgaggcatcatcatcatcgattcagtttgatctcatgaccttgttcccacgttgggcgttgggcatcgaaggtatataaccctcgacctcactcattcgatctacaaaaaccccctttgactgccttggaattcggattgcctttcgacaaatcacccatcaaatcaacatctcagtcaatatggagttcctcaacgccgtcgcctctacgctcaccatcccccaccctcaccaccccacgggctctgtcaccgtccccgagggtcctaggcatacccacacccaccaccatgggaagccttctcattccccccttcccgttccctacccggagggtccgtcgggtccccactctccggcccacctcgtccacgttcaccacactggaaagaccgctctttgggtcttcttcgccatcttcaccgtttccttcctcgtcgttctcattatggccaagcgcgtcgagcgcaagttgaggttgttccacttgatcaccgccactgttttgggtgtaagcacatactctcttggtgcgaacatttaaggaaggccatgttgactgatctagctacatttttccgctttgaccgatcgatccacagatggccatgatcaggtatgtcaatgagtcgaacgcgtggtccgatccgacggtccgaactaacgcatcatcctttatcaaccttcagctacctcgccatggcttccggcatgggtatcgctttccaacgtcaattcgagaacgcagccgacggatcccgaatcctcaggcaggtcttctacgcccgatacatcgactggtgtaagtgacggccaggcgtaccgtctttcgagagcatctattgacttgccttcccatgctctcgttgtacagccctcaccacccctctcttgttgttgggtgggttctcacgcggaatggctgtttgaccgaagattcaccccacttacctggtgtttcctctttatagacctcgccttgctctctggcttgcccttgatcaccactgccgtcctcatccttgccgacattgccatgatcttggtcggactctttgccgccttgaacagctcgagcgagaagactaggtggttgatgttcgccgtcagctgtgctgtaagttggttgtgtcgctcgacacagaccatgcgcaaacctcctaacctggatgttgtggccatagttctacctttacgtcctctttaccttggtcttctctggaaggcacggtaagtgatctgcccacgtgacgaaagcgagacagcgacattgttctgactttgtcccactttgacgtttgtagccgccaagctccagtctgccggtgtccagagggtttacaacgtcaccagcttgatgatcattgttctctggaccggttaccctatcgtcttgttagtagagagtgagcgtggagtcacgcagtttcaaacgcttatcactggttttccatcatcgcagcggtttgactgaaggcaagggcaggctctcggtcgacaccgagatcatcctctacggtattctcgatgttgtaagtttggtcgagccaggaatacgaaagggtccacatactgattcttacggcctccctctgaccagctttccaaggtcgtctttggactttacttgttgttcgcccactcccacaccgagggtgactccgtatgtcctctgacgggagatgttgcaatcctcgctttcaaaactgacaatatcactcgcaacaggtcgttctttctggcttcttcaccgagccccgcaacgccggtcagggttacggtgccatcaaccaggacgacgactagatctcctctagagacactatcgccgaccgtcaagagccgcgtcttgtcatgtctctgagctcttgcgaaagagcgcagtttttacgaacgcacacactctgaatcgatattatttacatgcctattagtcaacgacctgtctttcgtatatcccactttgtcaaaattgttgagaaacgcattctgtatgcctgaataggaatgtcattatatacatgctagtgacgcctttccctgtccttcgagctattccgctcgggcgatcagatccttctgtatggagcagctacactcctctcgctgcacattgttacaggactccggcgctactactatggcagggccgccttgcgtcgagcgttgatcgacttgtacgcgtctgtatgcatggtacttgtggaagcaagatgtcggaagcaaaagccggcatatgcttccgacttgaccctcgcttcctcgttgatcaccgcgtagaaactcgatcaacctgcgagtccattaccatgagagtcattccgatcatttcatgcacagctttccagcccttaccgaaggacgtcgaaaaggcattgctcactctgaaaagtctcaagccatgacccttcagtccccttcccctgacgtaagatcggcgaaaccattgaaaacgaggaatgcgccacatctgaactttgattgatttaagcagatgctgctaacacaagcgttgtcgggcacccatcaaatggatatcttcgactggattcagctgaaatgctacgtagcctatgtcataatcaacgagtaagcttgcagtcctctttcttgtagctgtttcgccccttgattacggctgacagcgcgtgcagacacgatgcctccgactggttactgttaaaactaatgcgtggaatcgcctctccaagtagccgtcaacgagcggccgtgagtttgacgaaattaatcaacgagatccccccatctgacttggaatatgcaggctctagcactccttcctgatcgatattgtccgacgctctttcacaatcagctgcgctcgcttatcgctacacgagtttcgcctccgctgtcccgtgtcgatgacggctggggcgagtgggccagaaacagagccatgcaattattagttatgacggatgcatggcacaggtggccaccttatgagtaagccgttttcagtcgagtcactggcatactacctcacgcgcagctcgacatagggatccatatttagcagaactttatcttgcccataatggacgacatggcagatactagaaagcatgcacatatgcaaatggaacttgccgtacaggagtgcgccgaatcggtttcagccgcagtaatgggctggactcgcaaccctccggctattccgcgaatacgtctgcattttgccagcggtatcagggtgtattactctgcaatgtacgggacccattgcaggccctgacatgctctcatagcggaagtggattgaaacatttattcggccgcatatctcaaaggtattgatcgacgaatgatctacaaaggcttgctatgttgcgtatttcaatctagagggagatagccacgcttctgtctcgccttcatagcaccaaccgaggggacctggatgtacaagtcgcatcagccgctaggagtcgagaagagcagggtttgaacgtctgtcatattgcacttacccatgtcgcattccgcgcagatgagccacttgagaccctgcttctgctgttcgcccttgccttcaaccttgacgttccgagtgaaaccgatgttttcaaagaccatcgggacgccgccgacatgccagaaaggcgccggatcttgtacatccgggttggctccggcatcagcttttggatcctcgtcgaacggagcgtcagggtcccggggcagctgcagatgattctctcgttagccgacaggcatcacaaaccgcaggacggggccgttcacgtatgtcttaccattccactctcggcgacgatccagtctgccgttccgctgctcaggataagcgagttgcaaccatccctcggacagtacatcttctgcctgttgtacttcttggtactagcgacggcgacgggtgcgcaaagggcattctcagccgtctcttgaggaagatccgagtatttgatcagctttgtaggcggtcggttcccgatcatgctttgcgcgtgaagcgccctagcgatatcagcttgcgatataccagcttcttcttgcgtaacttcggaagcttttttgccatgctcctctgcgtgctgcaagaggacgttctggcgagccttctccgttgaaaccttgatggtcgtttttctctcaatatcttcctcctctgacgttgggctgttggcatcggtaggtttgggactgggtacagctacgtgactagtggcagtaggggccgcgtcgccaaagtaatctcgagcagcaccggttgccttgttctcctcgccagatgctgactctgcaccctcatcggtgttgcgtcgcgccggcttgggacggtgcgtgtcgacggcagggatgggcactgggaaccgttcttcctcacagccgtatgccatcggcgtaagcttgatcagagtatgaagcgggacctgtcataccgatgaagtgttagattggatccggatgatttacgtagttgctgcacgtaccttgatatatggcagctcttcttgagtcagccccataaagtatccgtagagacatcggataatggcctgcaatgcaggcggtgtaagatcttgccatctaacagtttccatcatcacaagcttacctgatgacagatgatgatgatgttctcctgcctctcgagttccatgatgacaggctccaatctgacaacgacgtcttggtacgattcaccgcctcgatctgtaggaatgtaaggcgtcaacgaataaaaccgcaatgcgccaacgcaagctactcacatcggtagccgaacttattttcgtctcgtgcagcataatcctcagggtatttctcctgtcaacagcatgggtatgagcgtgacatcccactccggaatgtgtctgctcgactcacggcgatctcttcgtaggtcatgccgtcacagacaccggcgtcgagctcgtccaaggacttccaggtctttttagggtaaggtagattcctcgcggtggccaccgtcctctgtggagtcgatcaagatcagatctggaaaagaatccctccaaaccgagtaagctcgcaagcttacctgaagtgtactcgtccagacctatgcgcgaaggagaacaggaagaaattagaccgccatcggtcatcttgtcatcgacgcgctcgacgaacctgcagggggtgatcgccgacattctcgaggaccagagcaggcagagctgcagcgtacttttctccctggggcgacaagggagaatctccaccgatcattcctccgacattgtgcatactctctccgtgctgtgacgagcaatcgctatcagcggtctaatcgcgatgtctggtgattgagctttcgtcgacccaccctggaaaggtagatgtgtctcggtttgagatgcaggttcatcaggtaaaacgcgattcgactctgcaggtacccctctatccggttgatctgcacctgccgaccgacattcaagatcttgcaccatgaaatttccggctcggtaattgtctcgtagacgctctcgtactgctcaatccgcttcctgaaatcccgttcggcctcttccttgctcatgttcttgtaatcggggtcgccagaccgagccttgagcgcgacgttggacgcgatgatctcggggtcgtcgcaccaagattcgagaaagatgcattgaaacccgggttcccggtcgatcctctcttgaatcttagccctgtcgagtcagattgcgatcagaacctcgctccatatggcgcattttgatgcctatctatgcgactgacctccttgaccgtgtactattggtcgcgtctgcacatatggattggcgtcaatgtcaagttttgaagctgaacggtagcggttcgacctaccatgaattccgacgtttccgccctgtttcaaccaggtgatcaggctctccagactctcgctcgcgagctgttcacgaagcgcagtagcctctgggttggtgctcgaaaagtaagtgtgcgagtgatcctgaggcccttctccactgttgaagaggggggggagacaggtaatgagcatgggggcgatcggaattgcggcgtgcttcgacgccaactcacgcctgaacctgatcacgagcctttcttcgtcggagctgtccgacgttgaaaacctaccaagcgcggtgttgagtcatctctcttcgcaacaaaaaccattgcgcgccaggctcacctcgaccttgtattccagccactacgggtacgtcatgacgaaaagtgtaagtttgcgttgcgaatcgatttctgggtacgagtgacgacacccactctgagatacctcaacaatctattactgagatagctcttgccccgggcgggaagaccgacctgaaaggggagtacacaggttatatccgtcaacctccgccgacatccgaacgtcatatcgtggccgggttcttccccgttctccgttgactcaccatggcgacgacgatcttcgcctcggaatagtctggcctatccaacaaggtaccgatcccgctaacgctcggggtctgggtaccagacatcttgttcgactgggactgcttgatgaccttggtcgactcgtccagagtcttgagcatgtccgtctgggctccaaagtgcggagtgccgggaacgctgaacgccctggtctctccaccgggggagagagcggatgggctctggtattctgcattcgtgcccttgtccgtcatgttcaggttgaggtcgatcctacctgaaggaccgggcgtaccggcatcgatggtgacgttgggtacgttctcgcccggggatgatggccttgaagcgcctctagaatgtgtagcagacgaggttctggatgcgtttgccgtaccgggctgactgtgaagaggtgtgaaggctccggtgcccgacatggagagcttgcgcaaggtatgtagcttgttcagcgcggcttgcaccgaagcgttgtcatccttcgggtttggtggcagctgggaaggaggttgctgttcttgcgacatggtgggtcgaggtcgctttgaggtgatggaagcgggattcgcaagtgggcgtgttctaaggggtcgactgtaactatatcgataactatatgatgatgatgatgaatggtatagatatggtcggtcgataggggtaaagctagcgtgtgggtgtgtgggtatgctgccacctagtttggccgagccaagtgagcttggactcggcgttgaccggtcaatacacatcgacactaacactcacctcccttgatctcgatgtcgtcgtacattactttacactactctgcctacgacttgcttgcatcaacatggcatcattcacatccccgtatacaatcgtcaagggatagccgtcccatgtcatcatcgtcgtatatgagtacgagatccccctggcagaccacgccagcggtcgtacctttgggatcgagcggttcgaccgcgaccaatccgggctcgatcctcccgcatcatcatcaccatcatcatcaccaccatcaccacctgcatccaggtgtatcaggagccgctgctgctattcagcactcctcatcccctggacctcacaccggcccttacccaggttccgccccagctcacgttcgttcagccgggacgccagcacctcagggtatgccgacacgttcgtcgctttcgtaataagcacggcccagactgactgattgcaacccgcaggtcattatcatacagctagtacgccccatcaccatcatcactatgcacccatccctcctagctcggttgtccccggtgcaacggcttccagttcagcggtcccggcccacctcatcgccgggggcatggtcgccggctcatcttccgtcggactcggccaacaccaagcttctagaagggaccgagcgggtcagatcatgcctgctaccgttctccctcaacaagccgttcaacaggtagactacgacgtcggcgctcggtggcacccgaggtcgcaaaagcaggtcgagaacgagtgagtacaagaacgggccgcatcggaagctcttctcgccgaagcgatttttgcttccgctcatcaccacggacgactgctctttcgaccgaaagctaacatttcactctatccgctatgctcttctcatcagctcgctgccctcaaacgatgtcgccgcacactacgtcagcgcaacgatcatcaagccctcctcgagatcgtcctcgcctaaccctggaggtctccctcgtcccacccggacccttccgcgcgggaatcgaggaatcaagctcgaacctgatggcgtcctgcagagacgaggccgcatgtacgcctggtcccccatggtcgttgaagacttgtacggcaatccttatgggtacggggatgagctgaggagtaaggagcgggaggaagaagccaaggccaagaagaggttcaagatggccttgcactttgtcctcccagccgccgcgatcgaggccggtcaaccgctcaagggggacgagctcaagctggaagaggacgacttacacaagaagaagaagagaaagacgaccgcaccgcctcatctgcgtagtccatcgcccgtcccgaaacgagaggagattgtcgaatccctctcgcgtctgggcgctggaccgggcgcacaagcgatccatcaggacgagacggtcatcgggatgacttacctcgaccttgcgacctcgcccgccgttcgatataccctcggagttgccaacaaggaacgagcactcatgcggaccgtggatgatctcatcgacggcgagactgggctgaagggcgtgctgagtcggttgcaatcggctctagaggtggcggggagggaacctagcaggttgttcgagaccaaacagcccagggaaagacccacgagagcttcgacgcccgataaagaggtgctcgacgaagtcagggatggtgctcaggcgggcgagatgggacagcagaatggcgaagccagtgccatcgttgtcgattcggtgatcgacatggatggcgcaccaccggccgtttctgagggtacggacgctactgttcccccggttgccccagacgtcaagatggaagttgaagaagaggccaaacccaagtcgacccaggcctcgcgtcaaccctcgatggtccccgtcaagcccgccctcgattcgtccttccttttcggatcaggcgaaccgttctttgtgccgcccgggtcgatggtctcctacgaacccgttgatccgaaatcgcaagaccccgacgtgctcgacgtttatcccgagacggaattgagcccgctgcaaaagctctttgtcacccagaccgggctgactacgacgatagggccatcacccaacgatcctcggctacatctccccttgacccaccccgggtacccgcataccacctgcgtcaggctcaccccggaaacgcagaaacagtcggtcatctgcgccatggacaaaatcaaggagctcgcttccgactgccaggaatacgtacgccgactcgaagagatcagggaacggctcgccaacgttggtcgggctcgacgcaaagtgtggcagatcgtcagggagcgagccgtcatcgctaatgatggggaagttggggatggagaggccgatatcgagaccatgcgtctgcgagccgaggctgaacacgccatcagcgggactcaggtcgagacgagacggagacgtggagtcgcgacagcggtagcttcagccgtggctagttgaatcgttcgattcggttgtatcaagaatcttgacgtgttgtgcatgcaggtcgtataatatataggctcaatatcggtctttgtgggtataatttggatctctgtcagtttccctcgacaaggggcctcgtgatctcgatcaccacttccagctcgagcttttgacgaacagactgcttgggcttgcgaacgtccttgtcgcgcagagaatagggtagatttggttccttcttgaccacgatcgtaccgctctcgacttcctcatcctcctcttcctcgttggtaacaggtatcgaagggaccggcatgtcgataggaggcggactctcgccggatcgcatccgtctgtcttcccggtcgacaaatgaaaactcttgcacccgattgatagcattatgcttttggcgagccgtctgccatacgcttcgaggcgccttgacaggcaaaagatcggccctgtgtatctcgcgaggcacatcaacgtcgaatcggtgatcaattctcacgctaaggtccatcagcggccggacgttttgccttgcgtgcgtaagtggatttcgggcgatgtgggtttccaagtgaccaacgttaaagtagcgctcgtcggggcgagggcaagtcgtataaggacatctcagaccatcctgtatgtgaatggtctgaacgtgctgtttcaagtccccttgagaggcataaagacccgaacaatccttccacaggcatgcccatgcatcgacctcgtccgaacagcgtttttccagctttgctttggatgcatgaaccctcgtgaaatgactgtgcagttgccattctgagccgagctctgcgtcgcattcgctccaaccacaagggcggaggctcgaacgcctcagtagagttgagcccaggactttgctgacgcaactcttgttgaaccggtctagggcatgctcgggcggccaaaaggtgaatttgcgaggtgaaggacttcggggccggggctttggccggggtttaaagaccgacttgcgaacagggatttcaacccacattttgttggtgggtatagagcgaatgattcgcatattgactgtgccataagggctggactctggcgtcgtctctagcgctgctgttgttggcgttccggccccattgtgcttctcttcgataggagcagcctgtctgccgacatcgtcggcagcagatctttcaaacggaacggtaggctgctttcgggcattatctgcttgaatccgaccatcagtgtactgccgtatgccgttctgcgcgtctttggtgggcgccgacaaagaacctgtggattcttcttgttcgctcatgccctctctcggcacggtgtccttggaggtcaacatctcgttcgcggactctccgacagtagttttcggccggggaaggtcagcccactcgtgtggagtagcaagaagttgttcctccagctcatcaaagccgtcatctcgtggtgacgtctcggatgcaagtgctgattcatgcgctggtggattatatactgcatgtgagtcattcggtagttccgtcgtcaaaggttccatcgaggtgtctccgtctcctgatggcatgagtattggcttctccaatcccatcgatttcgcctgagcggtaggtattccgtccgaggtgagggctggctctagcgatgtcgatgatcgcatcgcctgagactctggagcggattccgctaagatcactcgtacaggaggagtgctttgcctcagggaggcctgatcacagttctcttggaatggggatcgggatgcattcggttccgcatgtgcgaaagccgtgtccgagtgatcaggtccagaagctggattcggcacgtccgttcgcgaggatagaatagctggagctgctattggaagcctggaagaagacgcttctgtggtagagtccggtcctatcgtttgattcgaagtcgatagctcagttcccgtggacgccccagatgtatctggatattctcgtagaatagactggaattgtattgcttgacttgaagtcgcttgggtgcccgatggattgctattcagaacatcggacctctggatagacgatggcgcaggcttcttccctaacgctaatagcgcaagcaaagccttggcaggaggcattaccttgttcagagtcgcttgtgtaatacttgaactggaagctgctactgatggcagactcgcgtgaggcggtgctataaggacgtccggtggtgctgtaacgacgtccggctggaatgaagcaccagttccgacagatcgcccttgcaccccccgcctttcgtgatacttcaacttctgcattaattgcagcagtctcggataatgggtggccttcggtaatgggaacgatgatttctctgcccattcgactattaataaatcatcagcgaagagttcagtgataccgcaggaataaggaagatagatcagaaaacccactcagcatttccaggaagcgagtttccgcaggtagacgaggattccgatatcgcagttcagcgatccgatattttacgtagatgatgcgagattgcacggtcggatttgatagcggcgcgataacattggtaattagggttatcaggggcaattcgagattttccgcaacatcctcccatttcacgagcggtcttttttgttgctgcagcactgcagtgttgtcaagaggttcgatccgagcagacggtatcgttgtagacccgatcgtggtagctgccattggacgtatgccttggttcccttgagacgccagcccggcagtggggacatagcggcgcgacggtagctggtcttctctggtagtccgatctgcagcacgccgattcctcctgatttcttcgatctctgtgtgcggatagatcgttgacctaagactatcgacggagtcgcccattgccgacgatgtgacgatgttcatggcgccttcgagtccacccgacataaccgatcgtttggtgagatgcgtatccgtggtagtatgcgtacccgtccaagcactggcgatatttgcctgaatggcagccatcctgttctccccgttactgccatagttcggttgtggtagagcagagcctgatgcctgtcggcctacggcaggtgtcggtcgtgctagaagccgctccatcacagcgttcctgccagaatgagtagcttgaacaggatagatcgactccccttgcaatccgtttgcagcgatcccgctatgttggctgttggccagtagtttatcgatgttgtgcttggagaccgcgctgcgaagggttcgtcgacgtgagcctgccctaggtttgtgtgtctaagagagacgcagctcacaatgccaggcctgcctcatacgccatcatcttgtcctgttcctgctgcaactgctgcctgagagcagagatccttgccaattcctgttgcactgtctgaacggggtcgttcacgccagcttgctgataggtttgcaactgtcgtaaccaaggcgcattgaccgatcttcgattcaccgagccgcctacatcgtttcgctgattcatctctctcccttatgcaggaaggagagtagcagcgtggaatgatggccggctctgtggattctatggcgtggcagagagcaacgtcgcaaaggagacaaggcagagagctttacaatcacgacctcgaagtcgaacaaggtaagggagcagagcgcagagcagagtaattactcgaggctcgcgagacgatgaggctcggtgagtgttgtgtgtgcgaatattacgtaagtgaagcgacaactacagcgacctaaagagaggtttggaatgaaagggaagtgagtgataagtcaagtgggaaggcaagtggtaagggcaatgagggtgaaaggccacaggatagtccgtccccaagtatatatgtgtttctgacattgtcatgctgtgctgtgattggctgggtcccctgactggtctcatcagctgacaccttgattgtggctaaaatggaaagggcacatcagcttagtcagcattccctttgacgccaagacttttcatgtgccaagtcaaccattcacagcctcatttcaaattctatcaccggcgatcacccaggctatcctctacgatttgaaggccaatccatctctgacaaatgtttttgttagatccaccgtccaacacattcttgaatcctctccaaaatccagacatcagatttaccgtgagttccttggtgaatgtggaatctgcatgtcagatgaagctattacaaccaaacattggcttacttgtgcaaagcttgtgccaggtacatctgcagagttctgcccatacccttcaattaccagtctgtaatccattgccaaacttcactatatatcaagtacatctcaagagctgttacggcggagcttcgctaagtcgcgtctaatgaatatctgagtgcaaggtcggtacggatcgtaggtagtcaaaaaaggagggaagccgagttcggctaacgggagcgaattcggttgggatgatacgaatccgggttgatgtacggataaggaagtaatgtcgctataggtagctaggatcgaaagcttgttcagtacgaacggtgagacgtctactacttagcgagtgtcctgggttgtaacctcttcacaatacgtcttgaagatgcggtgctgtcgcaaatcagtaggcgtaaatagaatgtgatattggaacttgaccttcctagtacaagaacgtcgtctgccggattcggtcaagttctactaagtatatatacgaaaccgagagtagtcgtagcgggtcgagaacaataggcggtccaagaacagtgaagcgaattcggaacaaagagaaccgaattgagggtcgagagtcggtcatctaacaaagatgaatcgttgtctgctgagtcgagatgtctttgtttggtgtattcagttgtcaaactatgaggtctttgttcgatatccgtcgatgccgctattgttctccgctggtggtgatatcgaatatgcgttgtgtcgatcgtagagagggtgacgagaccgcgcgagccgaagttggccgcgtaggaaccggatccgcatcgcttcccgtaacacagccatgctgatgtttcaagtacccaaggcaaatggtggggaagtcctgtgcgcacgggcaagagagatcttcgtgaacgggtaaattagaggtgatgccgtattagtaatcagcggtatgtgccttttggcatttttgttgtacatggatgtactgcatctatgaatacgtatattcatacagacgctaacatgacgagtcctgaagagatccatggaacgacttccggcgtgctagatcgtgagaccttagacctgcatcttgcttacatagacaataatcttacactacaacgtattgaagaatcgacagagaattccggagagatagtatgcctgtcgagaatcgaagagcgaaattgaaggaacggtgatttgcaaattgttatgaagcctaagcagtaaccgccggtcgtccccggcgaccaccggcggcctcctggtccttgtcgttcttggtcttgtcagcttggatagtctgcaccgaacgagcagcagtacgctaagacgagtgtatggccaaggaagtcagccaacagtgtgcctctagcgcacgtgagccggactcacctcgacgatagaagtaccgtcccggaatttggcctggaaaaggacgttcgcgccgctgaagagtccctccttcagactgacgacaatctgtttacaaaaacgaccgtgaggacgattgccttgactcatcacgcaagacatgaccactcacgaattgcgctcccttgaaccgtttgccaaagagttgacccctgtcgccgtataatgattgatgtcaacaagggcaagacactcatctggaagccgtctcttttcacgaacattttgcttgtatgactcatatccatggccgaatcgatttcgtcgaagatgtataaggggcttggtcgtgtttgcaggatggccatcatgagcgacagcgcgatcaaagatctggagaaccgcaatgaaatgtgaatacgcgaagctgttgcaacgtatgtttctggccactcaccgctgtccgcctgataattccgtcaagctttgcttccagaccgacccaattctgaccttgacctcaagaccctgatccacgctttggccttcaggaggctccagtttggcaaaattgcttggcagcaactcggcgaagatggcgccgaaatccctgacgggcagatatgaatgagatgttttagtgccgttcaaagattcgctgcgatgagcgatagacgatactcactcgttgacctgcttccacgtcttcgtcaatgcttccagcttgtatcgatccagctccagaattgtcgactcgattttgcttttatccttgagcacggtggccatgttctttttgagagccgcttccttcttttcaatgctgcaaaaagtgatcaaggttcagtaccggtaccttgaagagaagaggattctaccaacctatcaatcatgctcatgactttgttgttgactttgcgactggctgccttctgttgagcttccaattcaccgcattgtttcctgatctgaggcaggttaaccccttggaagtcgtaacgcgagcccggcgtgccgaacagccttcagggatattgcgtgaatcagctcgactcgatgaatcgcacgacctggcgactggactcactttttctcgtccctgatccacgtaaactggttctccaggtcccgggtcaaaccattcgctgcggtttcttcctttgccaatgtagaaatttcgtgaccaagcttttgaagggagagctctgcgtcactgatgtcttgtctctttgacttgatgtcgcgttcgagatcggcaagctcttcgtcgaaagccgttaggacagctcgctccgacttcaatttcgcttcggctttggcgagttgggactcggtctcggcaatggcctccttggcgctttccagctcctggaccatctttttgcagcttagctcagcttctttggcttcagctcgtgcaacctccaggtcggcgtccagttgctctgttcgatttagaggttggcaaagcaggtcagcaatcaccgttgagcccggtgcatctccggtcgactaacggatttccaattcggcggtctgcaactccttctgccttgatttcacctgggcggtgtctttgtttagcgctttctttcggttcgcgatgtcggcctattgaaaagcggattagctgcagggaaagccgagcttcttatcagcagtccactgactttgatctctttcaacttcgagtccttgttgttcttgaagtcgtccatctctttttctaatcgtctgcattcctcctgagcggccttctgtttggttttggcctcagacatgacttccttgagacgtttgatttctgctttcagcccttccacctcgagcacgagctaagtgagcgagaacgccttgatcagtttcgactcgttgcgcaatctcgggctatacttaccttcgcaccattgctgctttcgacctcctgttccaggagagagatttcatgctgtttcaagtctgcttccttcttgacctttcgataggcgtctatcgaggccttggcctggtttaaattcttaagtacatcatcgagttccgcctgagcgtttaggatatccttctcaagcttattgacttcttgaactttgatgataataccgctgctgctaggtgcggctcctcctgacaaagtacctgacgggtcgtaaacatcgccctcgagggtaacagacttgactccgaccgctttgttgaacgtgactttctgcgccgtctctttgtcttggcagaccagcatgtcgccaaagacgtaagccatggctgctgacacatcctggtcgtaccctataagcgataaagcgaggttgacctttccgggagcgaggctttcggctgtagccagtttctacaattacatttaaaatcagcaggttgtttgggtaatagcgctcggtcaccgcagacttgcctccgctgacatcttgaaagcgctgatcttgttcaaggggatgatggtgacacgctttcgtagctttcccttgtccagtaaagcgcttccaaccttctcatcctcaacaacaacgttgtagagtttgcctccggcgcagatctcaagagccgtggcattcttgtacatggccggatcaagatcgatcaggctagcaacaagtcccttgacctgagatcgatcgaaatttgggtatggatcggagtaggaaaagtcgatcgcggctagacgagatcgtagaaggtcccgcttctcgctcaacgtggcaatttcctcttccagcgtggcccgtctctcgctcagatctcgttccttctgctcgtcccagtccagcttgacgagtttcgcattgacctgttcgagcttcttcctctcactttctagcttttgcaacccaccctcgccgtcctttgaagccttcttggccctgggttccttctctttaagctccttctcggttatcccgatggtcactttggcctgttcagcctcagtcccagcggtagccacacgagccttcacttcggcgagttgacccatgtaacctcctgcagcctctccttccccgtttgagttggcgctcagtcccgttaacagcgtctgaagcagttcctccgctttagcaatctcggtgatcgaggtgtcatattcattcttgatcccagcgaaagcggcgacatcctcgtcgttttctttccgtttctttcggactccttgctcgagctgcacgtggacagatgttcagcgcctacgatgcatctacgggagacaatgagtattcttacctcttgaacacccttttgtgcagcggcagcccttttctgctcatcggtcaagttggctccgtccatctcgagctgagccttgagctttgtcacttctctatccaactcgttcactttgtcctggagagcttgaactttaccgcctttggcgagttcctatagcgagatcaaataaaacgatgttgagaaaggcgcccccatcacaagacttgaagccactcactttgtccctcttcctctccgtctccttgacatccttttccatacccctcaactcctctccaaacttgacgacctctcgcttacgttccgcctcgtgattctgtctgtgcttgacctcctcggccgtctttttcgccttttccacggccagagaccattcataagccttgaccaaccgagtcaggcgctccagctcggagatagtcttctggtaggccaaatatgtccgcttctcctccctcaacttttccaactgaggatccacttcttctcggagtagctgtacgcagagtctcagtacgaggctcccacatacgcacaaggtatctcgtttgggacatactgaagcgatttcttcgaccttcttatccttctttgccatcgttttcacagccttctcctttcgctcttcgaacattctcgttccgctcgcttcttcgatcattcccaaaatctcggccggtttcatattcagcaccttggtgattttccctatcgttgacgaatatgaagcgacgagttactatgactgcgtgatggtccgaggtgtttcgatagacctaccttgcatgatcaagaagttgggattgttgatgttcaactggaccgactggaaagtttcctgcagcttctgtagtgtgcatttgtgcccgttcaacaggtacttggaaacacccccgaccgcaatctaccgtcatcgaacccttcatcatgataagctaacaattcgcaaggctgcgcgcgaggaacgatcagacttgcctggcgggtcaccgtgatttgcttgctagcttcgaatccgataggactccgcgtcttgtccgagttatcgaatacgatagtcaccgaggcctttgttacagctgcctggcctctgctcgatagatgaccagagccggaatcatcagtctccaccacgctaaggggtcacaacagccggacaagtaccgcttgtaaatcagatccatgaggttatttgctatcgtattccatcgatgtcagtcgataagaccttcctattaccgagtggcagagatttcgattgactcacctctaacctgagtcatgttcgtgatgcccagcacgaaacagatcgcatccaagatgttcgactttcctgaaccgttcagaccggtaatggcgttgaaagacggatcccatcctgttcggcggtagtttccaaatcagccgctcgctcagagattgcagatatgaaatcagatcgccagcatgactcgcctgtaatcgttgtccgtactggatacgacttgaagcctgtccgtcgatcggccgttatgtttagctcggtgcagctcggatgtgtacgatcccccttaccgtcaagaatcaattcttcgatcctcatggcgtgaaatgaacgaatttgctgtgataatgcgactgcgttgatgtccggtcgaagcctttcgtcgaaggaagtagtaccacttcaaaggtcaacgacatgcatacatgcagcgtcaagaccggcgaaagtgtttgaacggttgttttgtttacaatctcgggaagggtggattgtcgatcggcgtttcttatcaacaaaatcaacccggtcgagctccgagctcgggggggcgtaaaatagcatatgtgtcgcagatagtgacgtgtcaatataatgttcatatttctcgtatccatcattcatcatctttgagcagcatgagcagacgggcaatatgcaacattccgtctcgagatccggtcatatcgtcactcgaatcactcgacacccgacctttctagctctgcctgactcatttcaatcagtctccttccactgaatcgacctccaaacgactagaaagagaccagaatcggataatgtcgagtccagaacccagaatggctgcgaccgcacctgaagagcacatcgtcgacaacacgcagaagccaggttagcttgatgaccaaatctatgggcgcgagcgggactacttcttaacccaatacggtctcgtcgtcacagatgccggcgttcagtctcttctctctaggataggaggattggcaacggaagacaaggacaatgccagcgaggctagctcgatggatatcaagggctcttcggcggcagcggaagaggcttctcaagtcgagaatgctgtggatagcgaagacaagcaaaaagaagcgagcgcacctggtcctggtgagtgcttgacatatcctatgaagcgtatatcgtgtgtaagaatgtcctctctatggtatacagccagcaaacttcttcaatctagctacgatgtcaaggtgagcttgcattgatgatcagtcgccatcccctgcacgctcggctcaaacatcgttcgatctaggtcacccttcgagatcaacaggccgatcccaattctcctctcttttcgatcaagtccttcgaggatcttggcctgtgagctgcttcttcatctcctgccggagcctgcttccagtactgaccttgaatgaattcgccagccatccccagctgctcaagggactctatgcaatgaaattccagaaaccttccaaaattcaagaaaaagccttgcccctgctactcgccaacccgtgagtcctcacgtcaaccgggaagatacgggtgcagctgacacacaccggaatagcccatcgaacatgatcgctcagtctcaatcgggaacgggaaagacggcagctttcagtctgacaatgttgagcaggatcgcgtatggccaagagatgccgcaggtcagccagagtctgaaagtcccgacaacgaaatcagctgacggagaatctgtcacgcctaccaggcgatctgccttgctccctctcgagagctcgctcgacagatcgagattgtcattcagtctatgggcaaattcttacctttgcaaaccttcctggctgtcaaggatggttgggaccgtaacaccaaagtcaccgcccaagtcatcgtcggaaccccgggaaccgtgatggacatgatcggaaagcgagtgttggacgtcaagggagtgaaagtgttggtgctggacgaggcagacgatatgctggatattcaaggattgggtgatcacactttgcgaatcaaaaagtccgtatgatccacttctcttcttacacatactcgtttgaaatgctgaagctgtcctttctggaaatcctccagaatgatacctcccgctgctcagacgctcttgttttctgcgaccttccctgaccgtgtcgatgctttcgccaagcgtttcgcaccggacgcaaacgagatcagactcaagccagaggagcttagcgtcgagggtatcaaacagttctacatggactgcgagagcgaagaggtcaagtatgacgttttgttggagctttacaacttgttgacgatcgggcagtcgatcatcttctgtgccgtgagtacaagttgcgttgacataagatcaggcacattcagactgacaacgccgatccgacttgcagcgacgagataccgccgataacattgcgaatcgtatgatcgcagagggtcattcggtcgcggccctacatggtagcaaagatgccggcgatcgtgacagcaccatcgacggtttcagggagggtaacaccaaagtcttgatcaccacgaacgtcatcgctcgaggtatcgacatcagtcaggtcaccatggttgtcaactatgatttgcctacactgcgacaagggggtatgaacagggtcgataccgagacttacctccaccgagttggtgagtcggtctccgaacccattctccgcgccgagatctgacagggtacataatctatttacttcccgctgcacaggtcgaacgggtcgtttcgggcgacaaggtatcgcggtcaactttgtcagcgatgagaactcgtggcaggccatccaggacctcaagacggatctcggacgagacatcgtcaaggtcgctaccggagactttgatgagatggaaaaggttagttcgagcgggtcacgtgcgagtcgtcacagtcttagctgacggtgttatggttctgatcagaccttgaaattccacatgaagaagtagaggatatcaactttgatgccagactcaatttgtaacgaccagttcgcaataatatcggtgcgatcagatgtgactctaggaagaatttatgcataccacgacaatttcgtttattaacatgcatgtcgtctagagtgcggaacagaatgggtcgtaaagaattcgttactcgtcgtctcacacttccccgaggctgactttctacccgtccatctcaacatcgctcccgtcgctatcagcgtaccctaccagcccgcctaatccgcctccccctggggtagacccgccgttgacggctccgtttgccttcggcgaaatcacttgtgatgttggttgaacagtagatgggatggccggcgatgacactgcagcaggttcgggtccaggcgtcgctgcggatgttgtgggactctcttccatcgattgcgtcatattgccgatcctggagggtgtcccaagtgggctcgttggcaccatttccatcgtttcggcaccctcttccattaaaccgtgcagcgccttttgcatgtcctgtaacgctttgagctctaaccgagcggcatacaagctcaaaccagcttgcgaggcggggtcttggattgttgctgctttagagactgcctccggctgatttaagccagcctctggagcgtagggtttgtcgggccctggaggagagaatgctggaggaggtaggctagtggtcggcggtcggatggtgtgcggatcgacctgaagagtgtgtagatgtcgaatgaccgttctcagcgagttttgacaggtctagcagtccggggtttcagcatctgaccgagacaagtcgccaagcatcctatctaactcacagctaatcgtccatagtattgaccgctgaaacccttcaggttccgttcccatacgtccaccttggccgcatcagtgttcctatcgaccaaggtcccgatagcatttcccagagattcgagcattttggggatatcctaccgacgatataacatggatcagcctgagccaagatgtgcacaccactgcagcaattcctaacctgcgtcacttggtcgagcatctccaacatttcggcagtgcttggcacgccgctgggccgggtcacattcgtggccatcgtgtcccttatggcctacgaaacgggcaagcggttgatcgtctgattcgagaagaactcttggaggtgattcggcccggagaggcttgtagctgttatgatggaggaactcgactgttaccagaatgcgagtagaaatagagtgcgtagtaattgacctgacaaacggccttcgtccgacctcggccatgcgcgacaagcagagagggggagggttcgatcaacctgatgtcatgcttgacatctgttcccctcaatgtcatcgtctctgagaaagatgacacctaggtcgttatagctctctacccttacacccttaattgcctttgaactgatagcttgtagctggaaggaattgcgtatcagtggttcgtcttagtccatctgctgcaaagcgtatcaaggatcgctgctatgacgaagagatctgtgacgtcaaaggtgtaaagcgctcgggagtcaaacgaaatcatcgaccaggccatgactaggaagcctcctctatactctatcgtgatcgctcgtcaagagagtgacgatgctggagcggatcgggattatcgcgagggggatctgtgtatagattgggtagattaccactcggagaaggacgtggacagtcaggatctcggtcaaaagggtctcaaagttccctctgcagaggcagcaatacgagcaaatcctgccaaacctctcaacaacaccgccctgagcgtgaacaccgatgtttctcgccagcctagccctcgacccctgggtcgctctccagcttcggagcatggcccaggtatcccttatcctgtccaacgacaaacacagggtacaactgaactcggtcctggtgtcatacatctgttcaagcatgctcagcccctcagtattttagaggcactcgaggctgacatggctgctagcggtgataggaaagagggagatggcaagactaagaaagaggcctctatgcagaaagcgactgctggggcggaagggcaaggcgatgcggagggacaagatggtactctgattgccattctagcagtacccatatggatggacgtcgcaaatctagccgactggttgggagcctggaccacttgcttggaaggctataggatgattcggtgagtcagcaagcgcaccgctcgtcgggttgatcttcaattgatcttgctatgcccattcagtgatgcatcgccaaataagaccttggtattgctcaaattcagggagatgcaagaggccaacgactttatgtcgatatatacgggcaagaccttcacgacggaccgtgatcggacggaacagtgtcatcctatccgtatacatcatttgatcctccatactatcaaggacgaccaaaaggcgaacgcgccgcctttcccacttctcttagtagggatacctcccaagaccataaacgagcttccgacgtgcccagtctgcttggagcggatggactccgtcgttacaggattagtcactaccccttgttcacacgtctttcactgcaagtgcctctcgaaatggggagaatcggattgtccggcctgccacctttcgcatcgcacacgagataccgagtcccaggtcccctattccaagtgcatgctatgcactgagagcaagaacgacccgaaagacaactgggtatgcgtagtatgcggctacatcggatgcagtcgataccaacagggacatgcgagggaccatttcctgagatcaggtcatgtctactcgatggaaatcgacacgcaacgtgtctggcactacctcgaagacacgtgagtagctttgcttcccggattgaatgacgatgacgtgctcatgtcctgcggcatctttagctacgttcatcgactcattcagaaccgctccgacggcaagctggtcgagctgccgtctgcgacatcgttgaccacttcgaaccgcgccttgggtggcatcaagtttgaccgtctgaacgccacggctctcgccaaagggttcggtccgaccgcttccgacgaaaagaagatggcccagttggaagacattacgcttgaatactcctaccttgtgtcagagcagctcgaacagcaaaaacagctacacgatgccgagacgcgcaacctgtcgcggcagctcaaggatgcccagcaaaaggctgcagagggcgagcagtggcggaaaaagtatattctcgccgaggatgcacagaaggcgatggagagtaaattgcttcccggtctcgagcaagctaaagctcaagcggaggccaagtttgaaaaggtcggccatttcagccctcccgttgatctcgcaacagcagctgatatgacaggtcgtgtgtacgagatagatctctagcctggcgagaaagttgcaagacgatttgcgcaccgagagggctatgggaaccggtcttatggacaagctcaaagcggtggaagtcactttggaggcctctcgcaaggagacgcaagacgccaaagagcagattgtcgagctcgaggacatggtgaaagacgtgacgtttgccctggagatgcaagagaaaacgaaggggaccgaggcagagggaggggacattgtcatcaaagaggcccccggatctagtagcaagtcgaaaaagaagaagaagaaatagagcggattgatctcctcgctctcgtttaacgttgtattcacatctataccctcggccgttgaaaggactcggcgtgtcctctatacgacacgagcaacaagaagcacactaatgtcttcggacttcgaatccgcccttatgtgccccaccgatcagctccttgatgacgctgtcatctgggccgtccacttctcgaatgtattccactcgctcgaccgaggcagcaggaggtccctttgtgaggtattttcggctagaagcgacgtgtatgagtgaccgcagaggatccaatgggatgaaattgtgatactcacaactcctgaaccttgtcagttggcccataggctacgccttcgacggaagagtctgggtggttgtgacaccagccagtcaggcccatcgcggttgcttggtccttggtctccgctcgaaagcagaccccctgagacaggaactcattagataccctgggaaattgatcttgcgtagatcctgcgacttacctgaaccttgccaatcctgtccggtcgactcgcacctgtcagcgtcgtataggccgcacatgcatttggtccgtcaactcacgccttgaagtgaacgatgcttttgcctgtggacatggtcacgtacttcctgataagtcctagtgtaatcgacatatgtttgagctgatcgggaaaggagagggagatcgaggtagggagctgagaaggtgaaatatccagggagatggtgcgtagcattcaccgacttgttctggttagcaggatcacttgctgacgtcatcacgcagcttcctgctcttgccgacgggtgaccttgtcgaggctataacgagctgggcgtaacatcaatcgtggccgtattgaccttgcgaaacgtagagcaaactgcaaggatcgcctgaccatctgtgtctagggtatgtgcgagtctacagatggctgcaagagtgtagttcgaggtcagaacctacatcgacggcaatgacgggctgacgagttaaatctggttgggacgtccggatggtaagtttgtatgggtcatcatcatatggaacatcgagctcaaagtgagccttgtacagagtcaggacatcttcggctgtttccgagcgttactcgacggtcctggcgtccttgatctacaaaccaaaagacattgatagtcagattagcgattagcagcaaaggatatggatcgggatttagaactcgccgtcttgccagtcttgccaatcttctccctgacggtctcaaaggaaggcaagctaggaccccagaccttgacattctgtcgttcaagcgagacgtcgtacttgttggctgtgagtcccacattaaagtacatcaacactggcagtaacggagcgatggaagcgctgtgagactcacgctcgaggatgttcttcttcagtaccctctcgatggccgaggaacatccaccgcaggtcatcaccacgtcaaagtcgtagaacggcttgggcgggttaggtgcctccccctgagctccggcttgaggaattgagttggtcgtagctgggatagcatcccccgagatgccggtctgcaggaaagaatccagcacacagagtcggagaaggtcgatcgtcaggattgaacccaagttgaacggaatgtaacaaggggatatgactaaccgaagctcctacggagacggtagccatatttcttgcaagaatatgaaataactgattgattggtgaggctgaggcagaaacgacaaggtaattggtcttcgaaactaggcctattggatgctcttgatagatttgatagatgaataattcatgattaaatgggttatggttgaaatgttgatcgatggtatgatgatggagatggacgacatgtgagccgttgttgatgattcatcacaaaatcagcctgacatttattttcattcgggtcgcacgtcgttctgtcgtgacccgaaacagccgaaatgacagtgtttcatcgtacagcgtcgtcccatgatctttgatgctactaacacaacgtgtttgttatacaactggtagtgattctcatcgtgtggactgccattgacatttctctcggtcataccatgaatcggaacgcaccgaacccgacattcaggaccgttccgatcaagatggccatctgtcgaatcgggtcgtggctgtcagtagcaacgatgtcatcggatatcagccacaccgacccacctgaacccgctggccaaagacaaccccagtaatccattcgcctcctgcccgtcctctcagcccgaacagtcctcgcgtgccggggttacccggagccacctcgctcacacctctcgtccccgtcgttgtcgatacgccggtcgtgcctccacccgttgaccgtcccccagctccgggtatgatacccatgctccaatccaacgtttcttcgaggtgctcattaccctcaccctgcccgcgaccagaggcaaggccaggacgagaagcagagccatggcctggcaaccgatcgggctcaatctcgagcgggtcgaaaaagttcggagccgggatttcccggaaaaaaaaccaaggcaggatcgggtagaggaaaccaaccaagaggccagtgaggatcgaggtgtagatgccttccgcagcggctgtagagacgaaaggcgcgtcaggtcatcctagcacaggggcacacgatataggtcgagacgagactcactctgcgcggtttcgtgggtcaagtcaccctcgatccactgctcctcgagagctctagtgtgctcgtcgtctaatgtcgcacaaacacaatacgtatcagcctcacgcgccctctgtctcaacgccagccgcattaagactcgccctgttccagaccttccggcacttcctccccacgtccagcgtagaattgtctcctcatgttggcgacctcggcagcagagagtcccgcatcaagcaacgcgtcgaaccctcgtcttcgaggttgggtcgtctgcacggaccgaggatcccagcaagagataagagcgagaaacaggcagaatcgcatcgagccgactcgatcgcagactcacgctcggttccccatcctctgcgtcgacccagtcgtcctcctctgacccatccgggtcctcgctctgaggttcgactctggctcccaccacgcagtgtaaccagactttttcctcctcggtcgtatcccctttaccctcacccgtcccggacgctccgccctgatcgagcagggcgccggctacgacttcgctcagtccgagtccggtgcgtgcttgacgatgacggccttcgagcgcacggacataagggaggaggaggataccgtcggtcaggagtcgaccagagtggatgaacttgagtgggtggttttggaacgatggacggagggagacgatctgtggtcggtcggacaaaggacggtgtcgagcgatggcaattcgaggtgatgggcatgatcagaagatgtatgtattgaaatgtgttgacaccagtcgacacataccttgtccttgacccgcccgacactctctccggcatctacccatacgtccaaatcgcctgaatccaccgcctcgcccgtaaacctgaaagtgatgctcctccctcgttcctcttctaccggctcgaccttgcttttacccttccctgatgctctattctcgtcatcgtgttgatgatcgtcagaatcggtggcaggacgtttccccttggccttgtcgctcaagttgggaagcggcaaatgcaacgggtcgtcggaacggaccgaggatattcggcgagctcctaagcgggagctacgggtggtggtagcgatgggcaagattgggtcgttgggcatgtctatggtcgtcgtcaggaatcgagagatggggtctctatgagatcaagggtgatcaccgcggatgagccagagtcgacaaagatcgattgctcgcctactacatactcactaactgcctgatatcggcccatcccgacctgcctgtcgatgacgattacgagagaaaaactcgcgaatttcggggaaaaccccatagacaagagatcaaaaaaggatgaaatcaggtcgcaagtcgtgataacgtcgttagatgtggttacaactccagatcgtacaccagctttactccgctagcactcgatctctgctcctgctcggatctcatcgcagccatgtcgacggctccgacctcgtcgaccccgttgctcacgccttccatctcccgatcgtcgtcttacgatcgcgcgaccccgacccgaacatcatcacaacatcatccgtatcaatccgcagctccagtcacggccatagagacgaaagcacggaccaagtccacggtcagccagagaagtagtagcagcaagcatggagcggcgcctaggttcgtgctcaggatcaaggacaagatgttgccttcctcgccgaggaggaggttcgtcacgggcgtcggtctcttgttatgcgtcgtcgtgctatggacgacatccaactttatcacctcggatctcctcgaaggcgggtacaacaaacctttcctgtaagcccgctccgatctaaatctaacgattctgagcaaaacgtcgaatgctgactcgtttgtgcgttgggatcgatcgcgcaggattacctacctcaacacgagcgcgttttcgctctacctcatcccgtttctcttcaaacgatggaatgctaaccggcggcagggtcgagtagatcgcgcacaaaggcaagtctattctcccggtctcatccccaattctctgaggacgctcgacgacgtattaatatggtctacgcttgacaaatcctataggtctcacgaatacattcccgtcgtccaggacgacctcgaaaattctccctctcacctgaactctcacttgcacccgcaagccgatcgaccaccatccaccctgacctcgagaacgctcggtgtcaggcgatccaacagcctgatcaggtccctctcaccctcgccagcgctgatcacccattcgtcccccctgtcgcccttacccgcacagcgacaaccggacacgttcagcccgcactttcagctacagttgggctctgattccgccatcgtcgagaacgatctcgatggcgacgaccgtgaacgcaacgaagacgccaacctccacgaccacccgtctcacccgcacgacgttcagcttcaagccctcccccgggagaatcccggagtggaaccccgactgacctcggcagagacggctaagctggcagcgacgttctgtatcgtctggttcgccgccaattggacggtcaacgcgtcgttggggttgacgagcgtggggagctcgaccgtgttggccggcatgagcggtaagtccaagtcgcatgggactataggctggtatcgaacggtacggtggctgattccggacggagtggtactcaaggtttcttcacgctcgcccttggaagagtattcggggtggaaagttttacgcgggcgaaagtgctggccgtattagccaggtgagagcaatcgcgccgcatctcttgcttccgtctcgcccgtcgctccgactgatccagactgtgcatacttacagcttctttggcttgattctcgtgacgcactccgactcgctcctcgcctcggtctcgaccaccttgcccgacccaacggcgcacgtcaagcggccaatgtggggcgacgcgttggccctgctcagcgcgttttgctatgccatctatgtgatcctcctcaaggttaggatcggggacgaagagagggtcgacatgcaattattctttgggtgagtcgtgtcggctaccgtgcgacacgccaggccttactgacggacactttcgacggactcgtcaggttcgtcgggcttttcaacacgctcttcctcttgcccttgatcccgatcctctctgccctgggtatcgagacgtttgatttcccaacaagaaaacaagacttgatcgtctgcgccatcaacatggccatcacgctcagctctgattatctctacgttcttgccatgctaaaaacgacgccgctgggtgagtcttcatgccgtgctcacgaacggtgttcgccggctgacatctacttgtttccgtcctgccctcacgtcacgatgaattgatagtggtgaccatcggactgtctctaacgatcccgttcgccatgctcggtgactatttacgaggagccaccgcagcgctgacgagccaggccatctttggcgcttgcctggtcatcgtcggctttggtctgatgggccttgaagggctcgaacaggacgagaccgccaggatcgtcgcggtagaggtgcatcacggggaacatgatgacgaagacgaggacgacatggaacgtgggaggtcaagcgcgaggacgtcgacttgatcacgctttcctcttggatcatgacgatagatagatgtgtatggttcaacaagagaggcggataatagttgtatatacccaaagaggtcatcatgtgccgaaattagcaattccataccgtaccagagttcgcttgcggatcgccgataacatccagcaatgatttgtccgagggccctggtgtctttccagactgagctgtcgttgttgtcgagagctaggtagccgattgatgttcggcccaattgaaagcaggatgataaagggtggcgttgtgtgctaccaggatcaatcatttatgatagcctactgaggtagcggttcttgtgccacagatggatgcaaggtttctcattgccaggtttgatatgagcccaaacatggtaaaggggatggaggatgcaacgaaatcttactttcttttcgaggcctacaaggacgcttgtcgatatgctttccaacttgacgatcggcaatttcagcgcgagtctgtttctgccagctgctgacgactcgcggttcggggtttgttttcgcgtttcagttttcccccttgatctcatcagatttcggcgagacgcgtgcgtaatgtcgatcaataaaaagaaggttagcgatcaggaagtctgatgtcgctcttgtttgtttgtttacatttctttacctttgatagggccaacgaacgtcatcagatcgacgtaaaagcagagtggctatcgtcagtttgcaacatgcaacttgtctcttcccgactcttttaggccaacgatcgtcttggcagaaacgggcctcgaacacgaaccatccgacaacgcaaaccatggcgggtctctttacgaatgccgaaagacatctcattggaggggtgttcttatcgttggctacattcgtcctcctgtaagtcggaaggcggtctttccccaatgtgtagatcgttggctaagggcatctctccaggctactagtaagcccatgcctttcgtccaacgtgctcaaacgtggttctcaacgatctccgcaccatagaccacattttcggtccccttcatcaagagtatatacttccttcagtctccgattcccggcggaagagtgacgtttggagcctatggttggttcaaagatcccgccgagggtcaaggagagcgagaatgtttgggacccacactggggtaccgatgggaccccgaactgatccactggttgaccaagggtttgatcgtcatcgggatcggtgagtcgagtagtctgtgagatacattgacgaacgtcgaaactgaaggatcgttacaagcttgtgcattctcgctcttcgcactggtggccctcttgctggaaatgttctgtcgaccttcctaccaactgaccaacccgatctggttcaggctcttctcggtatgcctgtctcgcataccgttcccgtccttttcgaatgtttctgttctgatagcatctcgatacgcatgaacagggtctgacggccttgtccacgatcatcgctttcgtattctcaaccgtcctcttccataacgggaggatccgattcgagaaccgaggcatcgacgccagctacgggtgagtccaattatgtgaaaagatggtctcaacaatcgtttctttggacccatgtctttcaatctcccgagcagaccggcggaatggatgttattgagcgcgatggtcctagggttcttgaggcaagtagatccacggccgagcgcgtgttttgaatgtcggaggactaagtttccagtctacctgattagtctctgcgttggcggacccagattcacaggcgagtcgaaccgggccttcagccgatcttgatctcgactgatcacaatgcctcccgactgtaggacgacacatgtatcgagccgacaaccgagccgcttacaacgtctgaattgagatccttaacgatgctgtggaagtaggggaaacgatgcgggggaacgaaaggatgaccttgtttacgattctaattggatttgtacaacgtttcggttcggaccatgctatcaggatatcgattagagtttggccttgacaggagcggcttcgttcacaagcgtgacggcggctgcactcaaggcgggagcaccggtctccttgaccttggtggctgatgaacggagagttgaggatcagccgctgatgcctcgtaacgacaaccaaacttatggaggcttactgaagatgaccttgttgccctccttccacatctctgtcaccaaagtctcgccgggaatgacagatccagcgaatcgaaccttgatatccgagtagggaccgaaagtctgcaagacgtgtttaccggcgatacccatgaagcagagaccgtgcaggactaaggcacggtttgatcagcttcatgaaaaggatggcgaaaagctgacgtgttgcactcacttggcttcttgaagccacccattgcggcaaaggcgggatcgatatgcaatgggttgcggtctcccgaaagcctacaagacgatgacagctcatcaggacgtgtgtggaaggagaggtttcatgggacctacctgtagatggcagcctgctcatcggtcgtcttctcctcgacaacggcatcgggttttcgcttgggagggttgttcggagccgaagcggggccgcgatctatagtttccagggagataagtgaggaagtcgctacgcgaagagagctcgaagtgtaaaatacgtaccggccccagtcttctggccgccaaagccaccgcagcctcgcagtacgacggtaccctggttggtgaaaatgactttgccagtgattttgtcaacggtctcgaccgcgctcgtcacgttggctgctttgccctgtcaagagtcacaagcgtgccatgaggcacaccgtcatgtaccgcaaagtccgcaagcactcaccttgtcgaggacttcgatcagctttggtcggttgataagggtcccagaagtaggaataggcgcgtggatcttcaagtattgctcgccgtgcaggagcttggcctgtggtcgagcagcacctagcgtgagcgcccgatcgcaccgttccttcatatcagtaaaaacttacggggttgaagttgggcacaaagtcaaagttctgtccactcgatgcgttgaactgaggaatgacaccgaaggtgggaagagcctggcaaccacgagcgatcagtagaagctcgagatgagaggttctcactaactagcactcacctggaagccgtcggcaccctcaaagaccagaggcagctcgctcgccttggccccgattccgaggttgtagagcatgacatccctctcgtcataggtaaactcggtctcttcgcccttgcgtgccttggcctttttaatggcctcggtgtcctcaccgccgccgctggacttggacgtcgacccagagacgtttccaaagttcttgaacatctgctcctgcgcttcctgggcagtctgagggtgagtcgccttgctaaagtcggtgatctgactccacttggacaggacatcctcgggcgagagcttcttgtcgttagggaaacagaatccctcggtcctctcccatcgtacttcagctgcccaccctgccatgacctcgtggacggttccgctaacgggacaagcgtcgctgcccaagaatccaacgacgggggcaataaagtcgggcttgaacatgtcgaccatttcttgaggccagatggtcttggtcatggcagtaccggcactgggcgcgatactgttggccttgatgttgtagcgagctccctcgatcgcagcagtcttggtcaaaccgatgatacccgacttggcggtcgagtagttggcctgtccaaagttgccatacagaccgacactcgaggctgtggtgatgattcgaccgtacttttgtttctggaagacgggccaggcggccttgatacacttgtacgttcccttgaggtggacagcgatgacggcgtcccactcggcaggagacatggcttggaagctcttgtcccgaaggataccggcgttggcgaccaaaacgtggacgctaccgtacttctcgagcgcaagcttgacgatgccctcgccatcttcggccgagaagggcgcagcgaccgcctttcctccggccttgataacctcttgaacgacgctctgggctccgtccttgcttacatcgttgacgacgacattggcgcccatctttccaaacatcaaggcgtagatccttccgagaccggctccggctccggttatgatcaccgtcttgcccttgaagtcgatttcgggacccttggggttggatttgagcgatttgctgacatcaagcaagtcctgtatcaagcaaaacgtcaggactggagtcgtatgccatctacacttctctggactgaccattgggttcttgccgtccattccgacagggtattcagatcccgacgaaaagtcggtaacctcttgccacttggcggcgacggccgaaggagtgaatgtctcgtcaggcttgaagttggcacctgctcatcaataagatcagctgcactccggagtactgctcttcgagtcttcacgaaccctttgcccgctgtcgcctgatctccgagacaaatccagctccgagctcgaagattcgaccgttcacatcaggtccctgttgtggagtcacagctccatctcatcagcaatggttaaggtttccgaagcacaaagggaaactcacgttgggagcagtgagtacaccaacgactggagcgatgaactcgggagtcaagtgcttcaagatatcaggaggcatgatcgtagcagtcatggccgaggcggcaatctatccgacgtgtccgtaccattcagttcgaccgggtctcggcccagggtccagaagcggcagacttacgggcgcgatgacgttggatttgatgttgtacttgataccctccttggccatggtcatggtaaaagcgatcagaccggctgcatgaattcttcaatcgttagtttctggcctctgcacaatctgagctttagtctgcgacgacttacccttgcaagccgagtagttgatctgtccgaggttaccatagagacccgcagccgacgaagtgttgatcactcgtccgtactagatccagagtatcaatttcgtcagcggtccgttgatccagtttcgaccctggtgcgacctagaaagcccaccttttgaccccggaacaagggccagcacgctttggtcatctcgaaagctcccttcaggtggacagcgacgaccaggtcccaatccttgtcgtccatgttcttgatcgatttgtcacctttattgtggtcgagtagtatccccgttctcgtcagcaagaccccaatgaagtcgacaaggtagcgagccactcggagaactcacggaggataccagcattgttgataaggatgtggacggtgccgaacgctttcacggcttggtccacgataggtttaccctcggtaacgctgcccgcagcggcgatcgcttgacctccggctatgattccgttttccaagcgatatctacctcgtcagcaaaggggctacaagagaggactatgtgaccacgcggctgaccttgcttgatctcgtcgacgaccttctgagcggcttcttgcgagacatcattgacgaccaccttggcgcccctcgatccgaaatacagggcgtatctataggacgagctcgtcgtcaatatcagtttgaagagcaattcagtggaaggatacgactcacgatcgtccgagaccactaccagctccagtgatgagcgctacttgtccatcgtacttgacttggcccgacatgtttgttcagatgatgttacggggaagagataggtggtcgacttgtgcaagatcctttgtcttttggctagcgattcgcaagtgaatttcgcaacctttgtcgttgtttgttagggaatcgttcgcgttcagaaggtatgtttgttagatttgagatgacgttgagatggagatggatgatagcgacgaggtctcgatgtatataaacagctgtctagggagagtgtaagaggttgtgtgatcaggagctcgacctaggatcgaccggttaccggttactcgcgattcatgcccccgcgcgtgaccgaggccaggcgaggggagcggcggccccggctcagttcgggttaagcgcggtttacgtcataaccgggggagagggggttcgcgcttttaagctcgaacgccagacgacatgcgacatgcgacatgcgacatgagagctggtttcatcatcgtcaataggcgaggtccaggtaatcaatcgaagccaacgtgtggctcctgtagccggccatagggatttgggcagtgcttctccccagccacgatcagatgtcgcccacagtttaagatcaagggggtgacttacgaaaaagaagttccccaagtcttgttcttcgtcttgttcttcttgatgttgcacttgctcaagcggctgttcctgctgatgctgggactgttgcggctgtacgaatcgcctgggtcccaagacttctcagtcggcgcttagagccgagtaccctggcttccaagatcttctcgtaaacaccaaacccattcccgagtctgcagcgaggtccatatcagatcgtgtgcgttcgatccatcacgtcaggtcctgccagtcgtttttgcaaacaaggaggcgaggtcattcttctccgcgacaatatccgccgcgccacaatctcgctcgttactgtcctactggtttttcagatgatcgtccctcttcgtcgagcacgccctcgtttgataattcgctatgccagcatgtaacacgacaatccatctcactgttcaactatagcaatagcgacgtagaatgacagcgcacaatttttccaaatagacctctgatcgagaatcacaagcaagtataaagttcgacggttcatcgcgttgtggttgagatcaagtacatgaactcttgccagccccctccgatgtcggacgtctcactgaaatatcatacgggcaccgaaatagggatcagtcacatgttccaagctgaatgaagccttgctccacctcgagctagcgtcctgccgtgccagatgaatatcgaacgttggctgttgtttagaacgacttccatactcgcggcaaatgcgaagacagcgggaatgtcaaagttggtcttggagggcggttggtagtgataagtctttctgctcaagaaaggggcgagaagcatcatccccgtggaggcgttgatgttgcgttttcgcttgacatggcagagacacaatttgaaaagaggtcaagccaaagcactactataaaactcatgaagatctttagtcttcccaagaaatgcaggtcaagcatctccctgttcccgagtcaaactttcgatcctcacacccaaaacctcatgttcgactttgcccctgctgggtagtcaggaacgctctgatcggagttcagaggaagatgaaccagagggatgccggtccgccggaaaggcgcggaggggaaatacgcgccgacggcgagggggacgaggcactcgacgcctttgaactcgctttcgacgaccacgaccgtactacttgatgattacaattaagagttggttcgcatcttaccagaccatacggaattacaagactactctcgatatcagcctgatccgtatctcggggttgactcacctcgccgaaacggaacgatcatatggaggccgtctgtcattgtcgcggtcgatgccgaaccccggtcatcggatttgaccgaacctggtgggaaaggaagccgcgctttgtaatgaaatcatgatggccggctgacaggaggaggaggaggggctggaagtcgcggacccggaaggagaagcgagaggcgaagtatttcggtacgctctcttacgcagcacggtgaatggctagggaaggtgatgagagcgatgatgatgcgttgtggccgaggacgaacggcgatcccaggcttaacaagcgtggtcatcgagattttcagctccggcggagatatctcgcgtaactcaaacagaagagggtctacctaccttctacctgctcttgctatccatctgtctctcgtgaagatacactttacttagatctggtcaaaacgacagccactccggtctacttgtcgttatcgctcgctgtccatacttgcctcttgtctcacacttaggccgagctagctagctatagcttattccccgcctcggtcacacgctgtacctcttctgaccgtccacccaaacccagataccacctaacgggacctcggtcaatcgtcggattacgccgtcaaaatcgtccccgtcgtctttgcgcgtcttgataattataataatacggggcgaggatcgaatttagaactccccccccctcctcctctcggactctcattctctttgacaacgcggtatataccgcctctcaccactacaaatccccatcacgacgacctcgtactttgctctttagcagacgcaagtcgtagtcaagcagggattcattcagctcgccagtatccgagccagaccgatagggacccaccatgtctaaccacgatcgcgatcgcgccgccgatctcgcgaacgatcggtccaccctcgaaccgtacatgctcggtccacctgtaacgacctcgaatgtggaaccaccatcgaccgagacgacaacgacgacgagtacatcagtgttacctatccagcagcccactattcacccattagaacaatcgaatgaggcggcacatgaacacaaagtggacgaggaaaaggtcgatccggagttcgctgacgaatcgactgtacgaggatcggacagcaataacggttcacaaacgaccaagatgaaagaactcgactcgacggctgtcagtcgggaagattcgacagctggtaaactccgagaaatggacgagaaacgacccgctcgacccgtcagcgttcgtctgccgagtggcgagcgggatgagaaaaagggcatcgatgacaacggaaacgtcgtcgagctggacggggacaaggtctttttaggaacggaagctttgacggggaaagccatcatcaaggacaagatggccatctctggaggaccttatactgaacctcgataccaccactcgttgcccctcccgttcatgaaacccaagcatccacccccaccctattcctattcccccgacctccctcgctcgaacaccccccactcacgcgttcgtctcttcttccatcccgtcacagctgcacgccttgtcgaccggccgtaaaccccaggtcgtgaccgcgatgaccatgctcaaacaatacctctttcaataccagggccacgtcggtgcctacctcgtcatcggtggagtcgaccagacggggtcccacttgttcaccgtggccgcgcatgggagcacggacaagttgccgtacgtgaccatggggagtgggagtatggcggccatggccgtgtttgagagcagcttcaaggaacacatgacggtcagtcattcatcctggtaatcaccttgatcccctgtcccgcgtgactcatatcattcgacgctacccctcatcgcccgtagcgccaagaagctatcgacctcgtcgccagggcgatccgatcgggtgtgttcaacgatctaggatccggttccaacgtcgacgtctgtgtcatcaaaaaggacaagaccgagatgctacggaactatgagatgcccgtcagtgccaagtttccccttgatcgtccggaggtttctgcagatcacacgaagtgctgataccccacgccatccgtttcgtcgttatgataccttccgacggtcacagaacgagcgaggtgaaaagactcgacagtacaagttccgaaggggtaccaccgcctggacaaaggaagacgtcaggagcttggtcgtgagcgagactaccactcccgtcacggccccgctcgctgccgaggccatggacatttcgtaatctactcctcgccttctatggctatgacaagagactagaggtcacggagggattcgtccatgtcgataatgttgcgtttgtttgtttttgttctttactcatgacgatgtacgaatctgggagaacatgtcgggatcgcacgggcggcgacactcggcggtacggttgtgcactcgactcgagccggatcgagagacagctcgccgtagcgacgagtcgagcttgtcctttctttccttatggccgatctggcgtcaaacccgaagttgaggaggaaggagtgatccttccgagtcagccctcgaaagcactcgaacgtggttcctcttccctgcgtcgcgacatgttgtttcattctgagaggaaaaagtccgtctttccggttcttccgccaacaacatgaagtttcaaggattttaccctgcccactagggtcgagatgattgctcgacgggtattggcactcctctttgtggtccacggtgagagcttgccgagtttcatgacgaatttcagcgaagccggcggccagctcggatatgtagatgcacatcgcgctgctatgacgctcaagacacctcgtctcatctagtgctacacctcggaccatgctcgaagacaaattacaaggaaaacccgaaccctgacaacgcatcgatacacacaaaaaataagagaaaagggcacatcgacctttcgtacagactcattgtccgtcctcccgcactgccgccactcgctcgttgatccgtgccattacttcgtcgattttgtatggcttgatgagaactatgtacgtcttgtatgatcagaatcggactgcaaatgcttcacaaaacaggctcacccgcatccatgccatgcgccagcgcctcgtcaatctgttgttgtcgagcattacctgtaagaccgatgacgaatgatcgtcggagaataccggcttcttcttccgatcggatcaatttaatcgctgtgagaccgtccatgactgaaaaatatcgagctgggtcaacgtcccgttcccagtgcttgctcacctctcggtcgactcacctggcatgttcacgtccataagagtcacatcgaacggcttgtccttgtcgttagttggcatggcggacgcgctgcacacttgtcgaatacgctcgactgctgctaagccgtgatccacggcttcgacgacgaccccacgcttcttcaattgcttgacaagaatcgtctggttaattttgttatctgaggaggcgtgaccggcgatcaaagtcagtttgtgcagctttcagtcgcccgccattgcgtctcaccttcaacgaccaggacgcgacaaggttgtgcggctttcgacatgtccttcgcttttgtcgcgaatttaggggtcgaaataggcgtcccaagctgagcatcactttcaggttgtggctgagcgagatgtcgctcagatgccatgactcgaacgtagaaccggaaggctacaaggaacgaagcggagcggagtcagacatcgaacgatgccgtaatcgctcgcgacgactcactgcaacccttgccagactcggagtcaacctcgattttccctcccatctgcgtcgagatctgtttagaaatccacaacccgaggccagaacctgcaggcggaaggccgagattcagcaagcgacactaacgctaagagagactcttcacgtacccccaaagaccttgtttgtgttcttggtcgcttgcgagaatcggcggaacaagatctgtacatcttccgcagccaggcccggtccagagtctggtgtagaaggcaaacatcagtgatttgtctggattcaaggcttgaggctccgcccgcttgcctgtcacgccaacgtagagatacaggtggtcgccatcctcgatcttggaaggaaagtcgactgccgggggtttgcatgtcccgtccctgcataccagaactaacattagtgctcctcatagctatcaatcagtgttcgggcgatactcacgtgggaggttctggtcgcatagcaacgttgacaacgacccgtcggatcgggccatctcccgaatatctcatcgcgttcgagaccaggttgacgagcacttgtcccagtctgaagggatccgtcatgacagtcgggacaggatccaacgacttgtcattcagatcgaggactagctgaatgccctttgctttggcttcaagggcgaacggcgttactacttctttagcacgctgccgaatgttagtcgattgctacgaataaacgcggttcagctttcatcaattgcttcatgcgaggggacaacttgcataggtgaactgcatcatgtcgaggttgatccttgccaaggctaggacatcgtctgctatacgcctttatgtgcagatatagaaatggtcagacgctgaattgtggtggaacggaaaagcacaagcggaagaataaggactcacgattggctttgcccgcaagagttgatattctggcacagctcttcgtccgccgccaactgtttaacgagctcttcagtcgcggctatagcctgaccattaatcatggcttgttgaacgctttcacgtagcgaggcgatatcctcgccaatcatctgactgcactggatgatcgcgctcgtggggtttcgcaactcgtgcctgcaaatagagtgactcagtacctccatccatcggcatagcagctggtctcacgtacgatgtgacgtcgatgagtaactcctgccttttgcgctcgagttctgctgcttcccttcgcttctctacctcttccagcctcgtagcgaaggcttcctcgaggattttccgtcgtttaccgagttgcacctgaagagaaactcgtgccaccagttctcgactttggaacggttttgtcatgtagtcctgaagagcgtgtggccatgttgagcaaggcattaatcgatttctcccgactcaactcacctctgcaccagtcaagagaccttccacgcgctctccctctcccgcccgagccgtcaataagatgaccggagtccactttaattcctcgtccgatttaacagcttgtagcagctcaaagccgttcatgtttggcatgctgatatcagagacgatgaggctgggcttgtattccctggccttggccaaacctatcactccatcgctggcctcgacgacttgtccgacatatggcttgaggatggacgtgagatatgtccgcaggtccttcgagtcgtcaacaaccaagataacgtcgtttttatcgaagaactgcgaagggtttgtgaacatcttagtcagcacgagaccccatgaatgtggtgtaaagcccacgcacgagtgtgttcggatcgagcgaggcagcagatcgatctgactggttctgacgggaagatccgcccgagtcgctactgttctcgtgcgaagattccccatctcgattccactgcagtgcttcatctacaatcccctctgcaaaggctcggttgcggtttggaccttccggtgcgaccccctcctcgatcgccgaagccggaaggtgggagaaaccgagaggcagcttgaccgtgaattgcgagccgtgtttcccgtcaggttgctcctctgccacccatgattcgagctccaggctacctcccatcaagcggattaattcctttgttagactcaacccgattccggtgccttcgtgcgatcggctgtgtgtcttgactcggaagaaacgttccccgattcggtgcagctggttcctcggaatgcctactccggtatcagacacttgcagaacaatatgctgatccgtatatctgagagtcacggagatgcctccttgatgacagtatttaaaggcgtttcctatcaggttgagggcaatcttctcatacatgtctgaacagagattgtcacgccgtcagctgtgttactcgttccacaatatatcatcagggactgaccaggatcaatgtagcaccggcgcatgtcatcctcttcgcaatcgacggtgtactccaacttgctcctctcgatcgcaccacggaacaagttggctagatccctcgtgaggctcccaatgggcaacggacggcatgcgatagcgtagtgaccgccctcgatcctggaaaagtccatgagctgatcaaccagccgtctcagacgtccgacatttcgttttgtgagtgccaagaggttcttgattcgattgttgccttggcactcgctcaagagatcgtctacaggtccgctgatcagactgtcacgaggcaatgagctcgtggggtcagcatgaggaagggcagggctgagacgcgctgggctcacgtcaagggcagtcgcaactcgtgcgagacattgctaatccaattgttcttgatttcgtctatcaggcgcaattcttccacccgctgcagctcggcttcaacggatcggacttgaagcagaccgctatatgccgaaagtcgaagctggtgatgccattcgacgtaatcttgatcgtacggacgtcgcatattaagaccgacgatcagcactccgctcggggtctctgcgctcgaatcgttacagatcggcaggaggatagcctttcggggcagcccatcccagcttcgaacttggaacccttcgatcagttctgacacgtcgtcgactagaacggctttccgtccttgcagggcttctttgaagggccagcgctcggctttagccggcttcgcttcgtcgtcgtcggcgcctgtcgagagattagagatcatcgacagcgtaggagaactcgttcgcgccgggtcgaggccaccgaacttgtgtgcaggtctcttgatatggacgaggtactcatccgccacgttcctgtgacccttagggacgccgagtgatccacctagtttgagcttcagtctccactgtgcttgtcgcgaactttgcgccgatcgatcgtcatccgttatgctggtcgccttggccatctcggtctcctcgccatcgcgatttacgtgataaagtgccgcaaagggtacatccttggaaatatcttcacttccgagtgcggagagtatggccgagttgtactcttcgatgttccttgccgcttgcaaattgtccgagacctcgcgcatggcacgcagcctccgctcggcgattactttacgggtagtgtttcgagtaaagttgaacaatcccaagaatttgcgaggattatgcttgtcggttcctcgtcggaaatcggtatcgaagattggtgtccaataccctgtcgcacgatacaaggatgcaggtcagggggtttctgttgctgcgcgatcgccctgacgcggtcgaatgctgacttacaactgtggtaatactcgaccagcggtgtctctggatcgttcgtctcgaacaagaacatgtcgtcatcctgagaagcgggcacgcccgacatgactgtcttggcaaccggacccaaggccgcccagacttcggcgtatcccttggccccttccatcccgaagaggtcagggtgcttcccctgaagcatattggcatagtgttcgttgtacagcagaacgaggtccggaccccaccataacgttgcctgcagtggcaacgcctggaccaggctcaacattgtacgcaagctctgcgaccattgttcccgtggtcccagactggtcttgctccaatccgtgttctggagtaggtattcaacgctcgtcgtgtctgtcacgggcttccttggccctgaagtcagttgatctaagtcaggcataccaaggatgaccggttcggctggcgggaacagcccagaaacctcgctttgcaggtactcgtggtccagatcaggcgtctcgttgacatcgtgatcgtgccaatcgttcgatgccgctcgcgattgcgctcgtctccactttgagctggatgcatgaggtgtatcaccgtcttcgtcctcgttcgaggcgtagaatgggaatgaagatcgatgggcattttgtagcgtcgtcgtgctgctcgtgttgacgtacgtggatgtggtacggggtcccattcgtgctcgcagcatgctggcagatacgatttcaccgtcgatgacgcttgcaccggatagaggtgcggcttgaatgacgacgagtgaagccaccctgctcctaggactagtcggcatgagggtctttgtcagggtaaaccctactcgtcgctgccggccacctgggccagacgtccgaaagacaatgtccaacgctgtatcccctttgatatcctcgatgggatctgattcatccgacctggcaaccgaagacgcctctcgatcccgttcgacgtgttccctgatcccatccagcaggtcgatctcgtccggcgactcgacgtcgtcctcttcaggcgaagagagctcggagtcgacctgtttttcctcgtcagagccaggatccaacttggacaactcatcgatcgccgcatcgagatcctcaggcgcaggattcgtctcgcgcgtattcggcttgtcagactgtttccgcgcccggacgtcgtattgttcaaatgtccttcccagcttggaccctgaatcctgcctctcggtcttgtcgagcttgacctctgaatccgacccgctacccgaattcgatcccgattctgaccgggacccggatcgccgtcgtgtagaccggcgacgttgtttcctttcgaattccgtcacaccgctcgtccaatcggcgaatctgaccatctcctgggtggacaacaattccaaaaactcgcttccattggcgaaggacttgtacctggtgttactccagacgggttcgaactggctcttgttgtttgtcgaagtcggtgcagctccggcggtcgaggacgatgcaaccgttgatgcggattccgtggcagccgagcccgacccgggtaacaaggaggaagccgagcccagccaagcgttcctcgtaaactgaatatccgccaacgagttcgccccgggtcctggaccgatattctcttgctccccgggtggcggtatggggaggagcatgacgaacgcggggaaagggtacgcctcgaggtagtctaatggcaaccccctggacatggtttcgaacgaattcgcccgtttgtttcccaaccccattcgggacaaggtcggcgtcgtcctcccgctctcgaccccacctgggctcaatggcccgttcgggttggcactatcgttcccactgtccatactgtcggcttgtcccgaatggtcgctcggcagatttagaatcggcaagaacgatggcaaggggaatccatcttgtcgaggggatgggatctgggtgggtgatatgcagctcgggtcgagcggagaataatgccccggatcgaggtgacgccggttatggtagggcaggtggctggacatgtctgttccgcctttgctctttgacatgggcgtgtgaccgggatcggatcggtctcctgggcgatcttgtgagactcgaagaccttttgtcggtagtcttgcacagtccgctttgattcgcgccggacgactcctcgtttgcccgctacgctcggactaccaggctgagcacgaccaccagatagagttcgcgtacgagcggacgaatttgcgagtcaaagataatgtgtaggattgtacgttgtgagaacgtgatcgcctggttctcgtctcgtcgtgatctcttgttgtcgagtcgattcgccggctccgggctgattccagctcggttctcctgcttcccccctgtttatcaattaaagtctgtcgtcgcgatctagaatcccgctcatgtcatcaaccaggtcaatcggctgtaaatttgtgaatacagtctttgagaagtagatgtttgtatcgctaggagcctctagacctatgaccatgtcaaatgggacagctagcttggattgtggctatcgtcaatggctgacggcgacgacgacgtcctcggcaactcgctcgatttctgtctccgcccaactctccctctctgccttgcgcgcgcgtggtcaggaaatcaagaatgcacaacactgctactgcgatatatggaaaggcaagccggttgcaggctgacaactgctaccatttactgatcagatactagactttcaatcgacattccctgtacttgttcgccgattacttgaaagtcaggtctctcaggcagagacttgtaggtggatttcacgacgtcgctgcatacgtgtgcgcaattggacaacaaaacgcagtcgcgccacctccagcccgtttcgctgccggttgccatgcttgaacggtctctctgcaccagacaaggcgctcttcgggtcaaccctcacgatgataataccggtatatgttccaaattcgatgccatgagaatatctacatttcgatcatcatctcgacctcgactatgatgccattcagacttgctctggtcagatttccacgtctgacgaatgggcatcggtggcttttcccctttaccccgcggcagtgcatccgaccggaagctttcatgtcttgaatagtcgaaagctttcacgtgatcaagattcatcaagccgaggaggatcaagaggtcggccaccaccgacagttgcttgtagaatgacctgaatcatctcttcgtctcccactttcagaacatccgctgcttcgatacatttagtagtaccaatcattatactcgaactatctcaaactaatttgccaccccctcggccgtttcgtaaccatgccatcatcacggtagtccctgccgcttgacgaataaccggatttggaaccccctgtcaagcatcatgcgtcaactggccccgcctacgtttgcggacgctccgttcttcgctgaccggcgtacgggcagaatccacgagcctgaggatgggagaaagatcgtaagctcctctttcattccgatcactgcgaggtgtcggacggatccgagtgggggcggaagagctgattaaagacggggatatcgggatgtaggaacacaacggacggaccgtggcttatttccatccgaaagacgtcggactgtatcacttcggagtgagtgctttcatttcctctctaccattgaccgcgtaccctcccgtctgactgatcactcgacgtcatgtacatctctagagctatcaccccatgaaagcgtataggttgaccctgaccaacgagctcgtcctaggatacgggctgcacaactatatgcaagtgcatgcgcccagaaaggctacggaagaggagatcgagcagttccacagttcagactatgtcgactacctctctaggtgagccatctcgcgaagatggacagcttcgacgttagggaagtaaaggcaaaccaacgctacggtctcgtgttcattagggtcactccagcatccctcagcgctgatatggcacacaatcgaaccctgaatcaaggcccggacgatccaaactacatcaacacgcaccggataggggacgacgactgtcccgcgtttaccggcctatttcaattctgccagcaatacgccggagcgagcttggcggctgccaggaaactcgccatcgggagtgcggatatcgctgtcaattggagtgggggtttgcatcatgcgaaaaagaccgaggcgagcgggttctgttacgtcaacgacatcgtccttgccattctcgagctgttgaggtgggtcggcttgtcggccgcctgaccgttgtgtggtaacacgagctgataacattgttacgcgatgccagggtacatcctcgggtgttgtacatcgacattgatattcatcacggggacggcgtgcaggaagccttttaccgatccaaccgggtattgaccgtttcctttcacaagtacggcaaccactttttccccggtacgggagctgtcgtcgagacgggcttgaacgagggcaaatacttttccctcaacgtgcccttacaggacgggatcgacgatgatacctatgtccggctcttcagggacgtcatggaccccgtcatcacgtgtttccggccgagcgcgatcgtgctgcaatgcggggccgatagtctggctcgtgacaggctgggaagtttcaacctctcgatcgaagctcatggagagtgcgtcagctttatcaagtcgttcaacttgccgctgctagtcctcggaggagggggttatcgacagacgtcggtctcacggtgttggacgtacgagacgagcattctcgctggggtcgaggttcccactcagctacccacgacgccgtacgacgcatactttgaaaaggacgggttcagcctcttgccgcagctcacatccccgggtattcagaatatgaacacgcgaaaggatctcgaggcgatcatgcggcagatcaaggaacagttgagggtcttgaatggagcgccgagcgtacaaatgcaggtcatcccgcctagtctgacggggacggatgatgatgatcctgtcgacgaggagaaggaagagcaagagattggaccgggtcaagcgggggaagtgagatttgagctcaagtgagagtgatagcatacatgtcgagtagaaccggaatgtgttttgttgtatctgttagtgccggcatggcaaattgaatagatttatggtcgaagggagatcttggctgcaaacaaagacgcggcctcacttcttagtgggataaggtaagtaaatccttctggtggaagagcccggttcgcatcggtggtgagattcgtcattcgtgtgcatcgagattcagcaatgatctgtacgatgcgcaacccgccgacttatatatcttcgctaggaatgaagacgcaactttattgcgtcggtgcgggtcctatgacgtgttgacaataccatggctacccaccggcgagcctgataccctactctacctcttcggcagctcgtctgaaatatacccgcattttagcggtctaaactgggtccattatgtggcgcatatcagacgggccgttcctgacccgtacatgtcgcaatggtaagtcttcgaagattcaagtcaaagaattgaaccgatttagccttaacctaagtatttcaaactgtcttcaagggcaaagtctccgcaatcgaatctccccggttggaatggagtcgttccttgcaccttctgacgattcgtctatcagacttgagtctttgactcaattgatcctatcagaataactatgtatcagaccctgatacgaatgtatatccagacccgcaatcaagaacgtcagaaccaatttctggctcactcgcgagtacatgccttccccaaccgcttggaagtatgactaccttgagacttgttgagggagactcgacgagtaagccaggatctcctccgagcctcaatactgtataatattctcaggcaagaggttcgttgtcgacctcagactctgcgcaaatcgtcccgacttcattctgggacacaatcaaagatccaggcctgtcgcagacctcagccagttggacgtgacaggcacatgttggcaacctcagagaaagcgcacatctgtagaccggggcacgaattcatcagaaacggctaggcacctcactgatggcctgtgttttctcatgatgtccaggatggaccaacgatatgatctgacacctgacgtttcagctcgaccatggtatcgttgttgatcaacccagaaaccaggcagaagcgcgtctctgactcgacaagcgcgagatgagcgagagcaagtgagagtgacttgacatggtatgatgagctcgagtgacagggcattcgacattgctgtcacgcttgtcaatccctctgctcataagctagcctcaggcatcgattctctgtaggcatcaaatagcaaatcagagaaaaaggcagccaaaatggtcagttgaggctccatctagatatcggagacgtcatactaaaagtctgactttgacaaaactttgacagcctaccgtcgctgtcaacaaggccgccttgtacgagaaactcgagaggacttacagtaggcatactgttcagccaattgaagagatggatagtcgaactaatttcgctcgccgcaacaacagctacggaagaattcgatgctctctgcttcgacttcggtatcgagctcgatgaggataccacggacgatgtcatggctgcgagaaagaagggaggaaaggaagctgctgaggccggcgagcccgaactcaagatcgagttgcctgccaaccgatacgacttgctgtgtttggaaggtctcgcccgtggtctaaggcagttcctgggcaaggagaacccgccaactttcaagctcagtaaccccgccaacatggttgaatgcaccgtcgaggagagcgtacgtgatggcactgcggatcatctccccgccggacgatgcactgaccccttctgatgttcctgcgttggcataggtgtcgtctattcgaccctactttgcttctgccgtcctccgtctcgccaagcccatgacccaagcaacatacgactctttcatcgacttgcaagacaagctgcatcagaacttgtgtcgcggtcgaaagctggtagctattggaactcacgacttggacaccatcaagggtcccttccggtgagttgagcaaggttccgttcccgtcgatcagatactgactagctctgatttttgccggcagatacatggcaaaggctcctcaagacatcaagtttgctcccctgaacaaggagaaggagtacaccgctgaagaactcatgaccctctacgaggtcagttgaacaaatcgaatcgaagtcgtattcgagctaataatctcgatcgtccgcttcagaccgaccgtcacctcgcaaaatatctgcccatcatccgggattccccagtctaccccatcatctacgacagcgaggacaaggtgctcagtatgcctccgattatcaactcgaaccgtacgtcgcgaagggatttgtggctcggcgtccgatgtgcagagctaagaggaccctttctttccgtatcttaatagactcgaaaattacgctcaacactaccaacatcttcattgacgtcactgccacggatcagaccaaattgtgagcctatgccaatgggtttcatataattgcgcttcgctgatgcttctgacgatcaattccagggatatcgtggtcaacatcatcgtggcaatgttctctgaatactgccaggtacccttcgagtgagcacgaatgatctacttcgtcatttcgcttcaagactgacgagcgaactcttgtacaacagggtcgagcctgtcaaaatcacctatgcgaacggcacttcgcgagtttcgcccaacctgactccccgagcgaccaacgcatctatttcctatatcaatgctgctctaggactgaagctctcgcctcaggagatggccggactgttgaacaaaatgtcgcttgctgctgctccttcgtcttccgacccaaccgagacgctggacgtctttgtgccttgcactcgaccagacatcctgcacgagtgcgatattatggaggatgtcggtatcgcctacggatacaacaacttgccgactggccttccaaagaccagcaccgtagccaaacctttcggaatcaacaagcttgccgatgtcgttcgaaaagagtgcgcgatggctggatgggtagaggtcctgccattgattctggtaagtcgacgtattgagcaaatccgtgttgccctgctaaccagcgacctgctttagtgctcgcatgacgagaatttcgcatggctgaaccacaaggacgagggtaccgccatcaagctcaccaaccctgccactgccgagttccaaatcgttcgaacatctctcctccctggtctgctcaagactttgcgagaaaacaaggcgttggctttaccactcaaaatcttcgaggcctcggacatcgccgtgcaagatagccgagaagagcgcaaggcccgaaactacaggcatgccgcggctctttatacggataagaaaggaggtttcgaggtcgtacatggattgctcgaccgaatcatgcaaattctcgaggttcccttcatcggtgcgctcgacgcgagcaagtccgccagtgcgcaggaaggatactacctgcaaccttcggatggtgagtggcgtgaagatgcaaacgaggtaacgcaaggaactgactagagctccggacattcagatcctatgtacttccctggaagagctgccaatatttactaccgacgatcatcatctcccaaggaagatcaggacaagcaggacaccagcgcggtcgccgctttggagcaagagacctcgacggcgtcgccgctagacacagttgcgaaggccttgaagagcgtcttgcctggtagcacttcgagagaggaagcctcttcacgagaccttctcattggatccctcggaattctccacccgaccgtcctccagaactactccattctcaacccttgttccagcttggagatcaacatcgagcccttcttgtagagcgatctgtgcgattcggaacacaataccaatgatgacatggcaacagataccctgcagcctcattgcacggctaacagtcctccctgtaacaagagaacccatcggaagatcggccgcaactaagatggatcttgcatgagtatatcgttatatcgtcgttacagaatctcgttaatatcatcgacacaatatggccgagttcgacttggcccgtccgactggactagcatcgacggcgcgattaccacgcttgttcggaccaagtctcctcttcatggaaccctctcgcggtcgagccgagggagttcccttgcgaaaattcgcttgcaacctgttctccttgtttaggtgatcggattctgcttctgaattgctccaatccgacccattcacatcgtccagcgcttccgcctgggctcgtgtcatcagcaccccatcggtcttgccagcccgcccagctgcctcttctccactttcgtatctccattcttctacctccattccgccgttgtcttcctcatcgacgtctgtcccatcaaggtccccgtagtcatagaatttaggtgtcttgcgacgtttcgcctggggtccagtttcatcgttttctattgaccgcttgttgacgcccttgagggatcctttatcttccgtcgatgcttcgacgacatggcatacttccacctcgacgccagctgtctgcaggacatttatccagaccttctgtgtctctgacaaatggtcattgggagacttgacttcgacaaagcgtgctcgcttctcgtacagattccagacactacatgagcgggccggaagatcagctctgacgtccatgcggaggatagtgggcgtgactcacatgagatcagggacaccactagcccgatggccgtactcttcacaaaacattcgacacaggacgctcagcgctttgccccctagacattgtataatttcgtccagatcgttcttgctaaaatcccagctgactcccacagcaagggtccctttgggccgttcccggtcgtctgtatcagccaacatctgaagacatttggaggtcttttgcatgtctgccagacgagactctatggcttctgctctggaagagtagaacgagtccgatccaagatctagaggtgctaattgataaggtgtttcaaacgctccgggtatgggaaggtatagcaagggccagaagagcaaggtgaaaagcgttgtgagaatagacgcttctgcgtggaacctgtgtcgcgcggatctgggtcagtgcagagctcgcgcgtttctcggacagccggacgtaccctttccaaccttcttgcgcccaccattcgagaacccactcctcgacgctggttccaccctcacgaccaagccatgtcgttcgagagcttctcccttcttcgcgatgcctgctgatgtccgctgcatggtcctgctcgtcgccgcttgcattggcagtcccttcgcgcttactcgcaaagaaggatcggagattcgatccctctctcggttgactcttgattcgatgcgctttcaggaatcgcttttccggttggccgagatcggcttcgcaaatgtggcgctctgccttggacagttcgagctgtttctcgaggcgcttcaaacgacgcgacagccgtggacgatagactgaagagacggagcaggtaagcgaggattgccaaaacacctaagaatcaactcactcagatgtgtgtctgcatcttctagtccatccaagcagacctcgacggcctcgcgcttcttctcttcgtcgcccccatagtggttcatcaagacgagagccagtcggtcgtaccatgcaccccgtttgccacgcctccagactctctgcgctagcagagccttgagtatttcgcattcctgatcgtattcgtgcaggatgccaagcgcagtagaccctttcgacaccaccctagtaagaatatgacctgtgacgtagattccgcgcgtaagctgtattgaacgggctcaagacctcgatctcggcgagaagacccacctagctcgaatcggtctaggacatgcctagaacccgattgacttcgaccgacctctttttgagcagcgctcacggcatttaaccaggtctcgtggacactctgccaggccctcttgacacgtcgagcgccctcaagtctgcctcccttgatgccaaacccgtagccactctgaccgacccagttgcctgtggaatgattctgttcgccaagcgcttcatcgaccatcgcttccatctccagcgctgattcgtactctagcaaagcttcgcggtttggccagaccctgctacgagtcgccatgacgtcgggatacgtccgcttggaagacgaagtgaggatctctggcaacatgagcgacttggcgattcccgtcgatggcgtgatagtcgaccgatagtagactagattcagccgatgaatcaacgaccggaaagggagcgctatctgcaccgcgcgaccgccgtatgcgtcgacgatcttgtcgtacaggagggtcctgccggcttgattgctgctcttccggatcggtgtcttcctcgccgtcgcggggctcgcgctgaacgtcagagtgctctgctggctaccgggcgatgccgcgttcttcttcttctccgacatgacggcgaacggtaaacggctctgtttgttcgcagaggctagcaagacggcgatcatctcgctcctgttgtacttgctcttccaaagcttgagctccttggcgatcttgaccagctctgccatgttgagttgggcgatcatctcttcgaccgtcatttcctcgatcccccttgcgaatgcgttgatggtcgaagtcagattggacaacctcttgtacgtgtaaaacgattccagatcgtcctcggtcggtacaataggctttccgtcgggaccgaggctcgaatcaactcgcgaggtgaccgcgggtgtcggtgtcgaaaagggtcgcttgaacttgacctgctcattcccagacacccggctcgacggctttaagaaactcttgaggtcgggtagtctggatgtagacgcgggaggtggcggaggtgatgacatgatctcgatcacctcgaccttgtcaggcgtgaccgctcgatcgcgcctagctggtgtatcttcgcgtcgcggggtggattcagctcggcaacgtgtgcgaggtgtatgttccgagaccgctgaaggctgtcgagccggcgtcccagatttcgcaaacatcggatgcaccttggcaggaggcgtcttgctaggtttagccttgacagctgtgcaggcggagatcgaggtcttgggtgatcgacatcgtgccgcaattcggaccgacgggctctggagcccatcatcagagtcagaggagatttctatcagctctggggtgtgcttcgaagcgcgctcctgtggtgtagtcggcgatggtgttcgatttacaggttgcggtgagccgatcagacccgctgatccgctcgaagccggttgcacaattgaagctgtctgcagctggtccgtagctgactctgataccggtcgttcggccaagacgtcgttcggagccaaaactcccggtacttccatgacgtcgatcaagacgtccatgaaacctgggatgtaagactcgcccagctcggtcgagtaccgggcgatgagttccttgacactgaatatcttgttcgtcttgcgcaagagcagccttgacaagaggtatttgggtccatagtcgagattcttaaagtgttgcaagatgtacgcctcttgtggcgtgaacaggtacgagtcgctctgtaacactgtcgacaacatctcgtcgacgatgcgcacgtacatcgagaccctcccctgcacatcctgttgagcctgttcttcagacgcatgcctggtccttccaaccccggtgctgaaaagatctatatgaacgtcggacaggtctctcgtaggtccagccggtcgagctgggatggcagccgtctcagagtcgtttcgttcgatcgccacaggtacggccgcctgccgagccggttttcgagttgatgggggaggcgagggtgaccacgacatggtcgtgcgagctcccttcccggcagagcggtgcagtcgtcaagaagaatgccgctatcgtcgaacgttatgtacctagccaaagtggatacatgacgagatgtagctcgagcaataagatgcaattcaaagcgaattcgagatgataacaaaccgaggtctcgtgtcgactcgctcgatttctcaatctcggtcgcgtccgacgcgtaatttgtcaatgtcatgagatgtcatcgtccctttccatcggttctcgaccggtagcacgggtacaagctgatttcaatgacgacgagcgactagagaagagggacagagggagacacacaagaaaaaacgggtcgttatggcgttaaacacggggggcgacagaacaacggaaagacgcgggcgagaaggtccccgggggaaagcagaggggaaacgtcgtgacgggagaaaaagaggccgtaaggagggtatagaggcagacctcgagatgggcaagagtcctaggtctagccacgccttcccatactgctagcattacggtggtaagcggtcaaatggtccacctcggcctgtgacgcgtgaggagggaaagtcgatcagccgtcatgttcccccaaagcacatcgagacacgctccactcgcctccaacgacttgatggcggaatgagcattctcgaggtccttgttgagcctgtctcgttcggcgatgagctgttaccgagggcgtcgtcaggatcagctcgtccaacccccctccgaccattattcgacgcaagagcgatatcgatactcacgtgctgctcccattgcctgaacctcgcctcctccatcttgacctgctcggtaaacctctttcgcagcaattcttcttcttccttgaacttggggttgtcgagcttcttgacctttggttcgccaaacttgcgcgtctccatctgggtctgacggtaagcctcgtaatgcgtctcttcggtcgtggtgacgagatcgagcatgtgaactcggaggagcaaggaccggagtttacggaaatcgcaatggtcctcgttgtcgactggaagccagcgccgaaaaaggtctcgtgagcatggccagggctgacgcggtgaggaacgcgggtgtacaggctgtgacgcaccttcggccactccccacaggtactctcggcccttgacgaccctcccatccctggtcttgacgtcctcggtactcccgatgatggagaacggcatggcatcctattccagcgacccaggatccccccgatgcatcctctcccggtcagccccacctcgcgccatgaatcgaccaggactcggactcacgatcaacgtcctcgagtgatccgcagaagcctgatcatcggcctcgacggggggtacgtacaccttgatcccctgggcgaccaaggtcgtcctgacgcgttccttcatctcttccaggtcggcgggggacatggtatcggccttggcgatgacggggatcaggttgacccgggtgcccagacgtttcatggtctcgatgtcgagaggtttgaggctggatcatggggggggggcggtgtagcgagaaacacgggcgtcagtccgaggtggaggatgaggggtggaaggatgaagctgaacgagcccgactcacccatgcccgccaggtcggataaagtagagacaagcgtgtaccctcatgtcgaccttttctttacgctgaggttgttgctcttgacgcatatagttttcgtgttggtcgtccaaaaagtcgacgatcgaagaccagctctcccggttgttgacatagtcgccgaacccgggggtatcgatgacggtcaacttgacgccgaaatccctctcttgcagttcagccttgatgatctcgacttcggtcgtcttgtcgagctgcttggcgaatcggtgtcggtagtttttcggggtgacgagttcggtcgcgaagagggtgttgatcagggtggatttccccagaccggattcacctgcacggtgggttcgcaacgcccaggggggggggggacgattgggtagacagcagcgatgtggaatatagttttcggttacgggcggttagccataatcgcacggtatgacggagatgcaggtaggtatcgcgggacgcaccgaccaccatcaacgtaaagtgggcaccttgcttggcgacgattttgtgcctctgcatgcaggcaacatcacggtcgccgtcgtcatgtcagctgagaatcgtcttatagagtcgggaagaatcgcctctgactgacctggttaggcaagctgatagcgacgagaagaggtacggtgtcaggacgtcattctgatgagctttgcgtgtccgacaagaacaacaacaaacgatgatgcgacgggtgactgactttgcgatgcctattccggttcccgacatgatgagagtgtagtgtccgagagtgtgtaatcgggagtgagcggctgacgtctgtgaaatggagaggaaggtgtaccgtcaacttgacagagtagtagtaatgcaacgaatgtgggaataggttgaccgcactacactgatgatgatctggtcctggtcgttgctggggtcgagcggctgtgagcagcctcgtcgagtttaggcgcgcgcgagacgagacaaaggttgggttgggttgggttcggggcaaaagttgaaccaacttctcattcacttggatgtcatcacactcactcgatcactctgctttcaaacctcccatactcaccacacaaagctagagatcacaaggacatcctctcctgccaagcaaaccactcgccattcacgtcataatgcaacgaacctcgctcgcactcgctcgtcgggcgatccggtcgacccgaaccaaccctaccacgacccccatcgtctcgacctcgacccgacaaaccacccagatccgattcgcctcggccctcccacctcggtcgtcggcgttcgcccagctcaccgaatccaacattaccgacctccgagcactcttgtccgccccgacctcgctcatgtctaccctggacggctcggcgagcgaggatgacctgagaccgttcaacgacgattggatgaacaagtaccacggaaagggtcaggtcgtcgtcaagcccaagaccgtggaagaggtcagcaagatcatgaaatactgttgggaaaagggtatcgccgtcgtacctcagggcggtaacactgggctcgtcggtgagccatgcagtcttccctctgacccgaaatccacgagcgtcgatgactgatagccccatggtaaactcgtccaggcggttccaccccgatccacgacgaactcatcctcaacctctccaacctcaattccatccgatcgtttgacaccgtctctggtactctcaccgtcgacgccggtgccatcctcgagacggtggataacgagctcgccactcacggtcacatcttccccctcgacctgggtgccaagggttcctgtcaaatcggaggcaacgtcgctaccaatgccggtggactccgattattgaggtacgggtcccttcacgggagcgtcctcgggttagaggtcgtcctccccgacggcacgatctgggacggactcggaggtgggctcaggaaggataataccgggttcgacatgaagcagctgttcatcgggtccgagggtaccatcgggatcatcacgggtatcaccatcttgacccccaagcgacccaatgtgagcatcctttgctcatcggcatgcgacgacccgacgttgtactaaccatcgagacgatcctcgaacgcgtccccctctctctctctctctctttacccgacaggccatgaacgtcgccgtcttctccctgccctcgtacgaagccgtccaaaaggtctacaccgagaccaaatcccacctgggcgagatcctctcggctttcgagtttttcgacaagcaggcgtacgacctcgtcaggcgtcatcagagggaaggtggggaagcggatcggaaagtgttcgagacagagggcgagttttacgtcttggtcgagacgggtgggagcaagcaggagcacgacgaagaggtgagtcggggggcgtggtcgttcaaggatgtccccggtggtcaggaaagggctaacgcgagcctctgttggggtcgtttatcattcatctcgggtagaaactccaaggactgctcgaaaacttgatggagaacgatctcatcctcgacggtgtcctcgcccaggatacgacgcagtatcactcgctctggaagctccgtgagctcatccccgaatccgcgggcaagtctggttcggtgtacaagtacgatctcagcgtacccgtgcccaaaatgtactcgctcgtcgaaaagatgcgggcgaggttatcggaatcgggtctcttcaaggaagaaggtgggggtaggatcagggagattgtcggatacgggcatatcggggatggcaacctgcacatcaacatttgcgccgacaagtacgacgccgagattgaaaaggtcatcgagccttatgtatacgaaatcgtcgccgctgagaggggatccatctcggcggaacacggtttgggtgagtcttaggcagtgggctttcggacatccacctcgatctccagctcatgtcgtctcgatcccgacaggtgtcatgaaggccccttacattggctactcgaaggaccagaccagtatcgacctgatgcgacgggtcaagaagatgtttgatcccaagggaatcctcaacccttacaagttcatcctttaaaggcgtgcatagcgggaggaagagacgaaaagagtgaaaagtctgccaagcccgagcggtgctagggatgtataagaaaaatgtatcgactgtgagggtctgcagatagatgcgaatggacacggatgatcccaagatcaagctttgtcgacttgaagtagccagtccgatgcaaaggcttccaatgagtattgaaaaggttacacctcgccgacgataggcgatacttgatacaactggattcgatccggtcaaggctctttcctaagcctcccgtacctatcgatagggcatgccgcctccgttcatgtaagatccaccggccccatttgcatacgggtccatacctccaccataaccatacgaaccattcattccggctccgtagctttgcaccagcggtgcagcatcgccattcatacccgatgcgtccatagcatcgtcgtcctcgatctctcgtccttcctcccgcgcgaccgccttgttcagttcgaggatcatcggtgccaatttgtcttccagagcctcgaagccctacattcgatggcaatcccgaattttcgtgtcagtcgtgccacacagaaacatatgcctaagaggatatgggctcaccagtcgcacgacctccttgacgggcatgctaccggtgccctctgcctcgatgtaaaacgtgccaggcttggcgttgtagtcgaaaggctcatcaggctctggctctgcctcatacgcagcgctcttcattggtggccactctgccttttctgtagaggtataacgggcaagcgtggccgaatcagactctgtccaatgcaaccggcactgtgtgtagacgacttacggtcgacctcgaaccagtagctggtatggcgcagcttgttgtgcggatcatactcgtacccgaccgctgagagcggtgaccactttccgtggtgttttgatagaccctatcgagtccaatactgtaatcagcggttcatctcgatcgccttaaactcatttcgaacgcaccttgtacgctttgcagatgatatcgatctcttgaccctttccgagtttggtgataacgatcggcagggcattcgtcccactctcaggcaacgcgactgtcaggcgtatcagagcgggcagtatttgagatcagcccttgcccagatccgagaacaggccgtagatggacccacctttgcctattggctgaccgaagtctctgggtcgctggctcagcattgcttgaccttccgcatcgctaggatctcccgcctgaatgtccacacgacgacagatcagagagggcccatcggaagaggcatcgggcttactcaccgtcactggcacgacatccaactgagctgtcgtcaccggtaaatgctcgtcccgcgtgcactttaccctgagatgcagttcgaccatacagtactggcaaccttcgtcgcaagtgcaatcctagattgttgatgagttccgtgaactgtcagaatcagtttgacatgatgatcgaagcgatgagcgactcacccgcgtttcccgcatgttggtcttgattcccgtactgatcagaggaatcatccctagtcgatgcgctataaactcgtccggcagaggactagtgttttgtcggaacgagacctggtcgatacctagatcaaggggaggaacatctgtcagtcgccgtgacacatgtagagctgttttcgagtctcgaaactcacagaccgtcggcacgtccgccatcatcgctctccgcagactgttcgcaaagctagtacgaacgaataacatgctcgcttttaggtctggtaccgactgtcaagaggatggctcgcttccacctacgccatctcgactccagacaactggaactcggtcgtgtcctgtgccagcgaccgcacgacgatgttgcctccttccgcttgatagttggccatggcggaatgatcagcaccttatcttcaagatctttggttctaccagcagtgaacggcttggatgtatacaagggcaaggcggtcgcttaaagacatcaatcgtacttgagctcgattatcttctgtacggtcgacagtctcgagagcaagagagggttgggcggttcgcgtcgagtctacgatcaaagacgagtgatgccgagagatatcaatgggcatgaccaaccagcgtgacgtttcagcttgaggatctatatcagatcaaatcatttgataggtgatctcgctgtaaagacgccgctactaaacgtcaatctgatcagagtaaggtatatggcctatatgggtcacatgtggcttctggcttctctgaagacatgcggaagaggcttattatcgttttcgcgcgggtcttgtttgtccgtctctagcctggccgtggaggaaagagaagaccccaatgacccagtattgacccatactcaatttacatccatgacctacgtgattagaggtagctttatcgagacgattatatcaccaactcctaagccaataaacagcatgtcagcatattgatggcatatttatcgttcgtcagcagaccgcggacaggagtccattcagctttgcatcctcttatttttatggccaccgcagtccaatcatccatcaatcacgggcgtgtaatcgaattttgtgtgagatgtgagaccgatctgattttgctacctcatcgtgagatattctcgacgcaccgcttattcagggtcagtcaggtagtttcacgctacatcaccttgaaagacgaaatccgcctgagggttcccgttatctacaacggcagcagcaaaatgaacaccatgatatctacccgtctaggtagattagacaatcttttactgcctttggtcatcgactaaatgttcggcaattaccatcgatttcaagacgaggtatacgacaatcgactgcattatcgaaaggactcgccctgtgtaccgttgccccccggacttcgtgagctcagtttgacttgcaaagaggtccgacgggaaatcagagcgcagcagcttcggagcttgatcctttggtcatcaaggcaccggagcaatataaatgagatgatcaatgtcgacgaaaggctattcatacggtgattattttgccttccacgcttgactatttgcaatatgacaacgtgacatctgtgatctcttagatccttttcacacaatgcctatctgagcgaagatggcagaaccattcgggacttcgtcgctaaagcacccaacctgagtaaactgacggtattgacactaagggagtcggattggccgccagtcaccccagccatggacaacatacaagtcttgagaattttcaacgggtttcactccaacaccgaactagacttgaacgatctgttcagcggtttgacatcgctcgtcatcggtgcaaattccatcgttagcaaaccttttgcttgtcagtccttaaggagcgtgactctccggcttgactcgggcgcggggttcccgtggagcatggctttcacatccgcatgcgaaagatttgaacctcagggcgacggatatgtgtgggcccggtcggagaaagtccgtcggaaaatgccatttttctgtatagaaacctgtcgtaaacaaccctcccaatttcaccgcggatattcatttaatggtattcagaggatggtcttcggcgcgcacctcgacgagatcaacgtggagatgtcagatgaggcaggtcactcatttgtaagtgtccgatggtgcatgtctaaacaccggctggaactttgccaattgtctggttggctgctgctttggatagcgttgcgtagcttactggttcagcctattgtcagtgccgattagttcgatcagggtcaccatcaactattatggagatttcgcgttacacgcgcgcctctttcgttccccggccgtccaaattcccaccaccgagtttcactggctgaggttactgcgaccggaagtcggcgaagtccaacaattcgctcaggcgttgatcacacacacatgcggactgcgcacgatcacgatcgagttgaggtttgcgcccggctataatgagcgggagcccaccagcaggatcgcagcatagcggttcatccgagaggatgccgccagaggacatgcacccacctttagctcgatctacacggaggacaagtctgaaaagaccaagatgtgccgcgaattggctcgtatgtgggccacatattgaggcagtaagacagctggcaggacgtagggcaatacaaactctgtctctgtagatgtcgtcatcgacctccaggtccaaactttgattgcgccatttgtctgaacatggccatcgtttcgtcgtctttcgccttcatactttgtagtcgatccgacatgcccgctcgacgatcatttacgacttctgatcggcgatcttgtcgccgagcattggctgcttcacgttgtgccagcctgatgagcgaacaaatcggtgaaatcgatcagcgagatgccaaaaagctaggtatcccgctaccgacttacgccttttggaattcgtttccgccacccatcaatgtagcctcgtccagctcgatacccgcagatggatctttctctctgtacatcctgttctcggcgtttgtcgcccgtctctcttcgagcttgccctcccgtccacccgtcttgggtaccaactcctctgcgcgcccgtaagccttgttcctctccgccttcctctccctcgcagcctcttctcgctgctcctccagggctagctgcctatccgcatgattggccgagaacgtcatcgaagacggcatggcaggaccgatcgtacgtccggcggaaggtaaagaaggcccaatcgctgatctcgtagtcgataccgagggacccgctataatcccaccctgaccgttcgtcatcttgtccacatccgttcgaaggcgctcgagctcggttttgtcgactttggatcggttgtttgcgaaggaccacttgtatcccgtctgcgcagaggctgccacggacgttgaagcgattgtgcggtagtacttgggagggagcacgaggtcattccaccgtttgacgaacttcttgaaatatctatgcggtggatgcgtatgatcggtgagcccaaaagctacaagcgcagaagtagcattgatcactgactttcgagaagcgtccccggtcaagtcatccagatactacagtggaacgagattactcagtggattcggagacaggatcgtgtagtaaatcactgggctcactttgcctttctcttcgcgaagccaggctttgaactcggctgcttttaagctttcaagatggtcaggacgccaagatcagcctttcgatgaccggaatcgacctgacaaacagggccttctcacaagtagtcgtccatggtcaattctttctgtcctacctccgacaaactggcgatggtttgctcttccttgcgactacgttcgccgtcttcacttccatatcgatctcttgagcgatctcgccttttacgtttcgactcgcggtcgtcccgcgatgacctttcccgtctgtgttctggagatctagaacgatcgcgaggcatcttggatcgatttgttaatggagaaggatctaggagccagggttcttgaaggtagctctgtttacaacgggattcgagaacctatcaatcgtcttaattcttgctaatacccaactccgagctcgagagtgttggccgaagatgacgattacctcggcgggattccatgaaagtaaatattcaatttgatcaggaattgtagaaatcgaggttgcaacatcgagaccttcaaattcgtcactttccaagatcatgggatattccaagcagtctttgggggcactctcggcaacgtcaaagccccatagacaagtacataactatactctgggtaatagctcagcatgggaaaaaaatccagcgattccaaggctgctaataagctcgcaaagaaggagaaacaggcgaccaaggtgagactcaagggctctgcataaggctagtaacgttcgtcacttacggggatagaattgacttcacgccgactagagcgccaaggctgagaggaaactcgctggcaagggcaagggaaaagaagagaatctcgaagagattttagcccaggtaagctacgatctcgacaagcgagaacatgagcgtacaacgaatctgacacaacgagatgaatccctcggcagtttcaagaggattggcaaaaggtcggttttgcaaagttctaccgtcgggaaaccactcgggtttatcctggaccttcatccaataggcgcatgcagtcaaggacgagatccaagctggagcacccagcagaagagcttcagccactttaactgcttacggggagcacctatggctcataggaggcggtaagacgcttcatcggatagcaagctatactttccgctgaacacgagtgacgcagaatactttgacggccaaaaagctcatttctagtgagtacaagaaccgctcatgcgttattacggccggctgactcgcttctacagcaacgatacgttccggtactctcccgacaagaacgaatggcgtttatacacatgccccactgcgcctccgccacgatcagcgcacgctgtcgtcccgctcgcaaaggaaggcggtcaactctggctctttggcggagaatattcatcctcgaaccaatcaaacttcctgcactaccgcgacctatggtgtttcagcgtcaaggaccattcttgggcgaaagttgaagtcagcaagggaccttcagcgagatccggacataggatggccgtctggaagcagtatatcgtgcttttcggtgggttccaagataccggtatcaagagtaagctcctctagtctttccacgccgggtgaaacgagtttgctgagcggttgcttatccaccgtcagcgacgtacttgtcggacttgtggctgttcgatactgagctctacaagtggaagcaggtggagacaaaggacgcaaagcgggcgccagggtgagcgggcgccgtaaagtcggaaatgatgacgtttgacgctgacggatatctgactattacaggcctcgatcaggcttctcgatgattccctgcccagaaggggtgattgtctatggtagctaccgctgaagcatttattgtcatgccatagacaagctaaatttgtgaaaccttccaggcggttacaaaaaggagtatactggcggcaagaactttattggacttgccctggatgacatgtggacactcaagtaggtgtgaagttgtgctgagagtttctgaaccatgctgagattcgagcgatcaggatggatacggatctcacgaaagttgtctgggagaaacgcaagaagggtggcctggcgccttcttcccgttcaggatgctcgatgacacattgggccgccaagggtatgggtgttctcttcggaggcgtgcatgacgaagaagaaaaggaagacatgaagtcggtcttctacaacgatctgcaagtgcttctctcccgttgttccgatttcggttggcctaaggctgagccttcttgcgacaactattagcttctcgtacaacccggcaaataacaagtggtccatggtcacgctgcaagccaagaagaagaagacgggcggaggcggagcaaaggcaaaacgactggctcgcgaagcaaaggccttggctgcggctcaaagcggggaaggtcaggatgtggacatggacgcgcctgcacctgcgcctatggttggcgacgaggaagatgatagcgatgaagacagcgagacggacgacaaggtcagtccgtagcatactggccgctgccgagttgagcccagcctcacaagtctgtccgcttcgcagcccgctggagaagctggaatggatgtcgagtcccagaatcgggcggaacaaagtggcgcattggtaccgcctctggtcaggtacaatgccatgatcgctgtgctcaagaacacgttctacctgtgagaatatgccggttaccgcatctaacgattgggcaccagctgatgtttgcaatccaatgcagctatggaggctcgtgggaatcatctcgtcgagagtacacgcttgacgatttctactcgctcaacctcgacaaacgggacggatatgttaccctccgtgcgaccaacatcgaaggtgaagactggcagggcagcgatgacgaagacgacatggatgtcgaaggcgatggtgacgacgatgaggacgatgacgacagcgaggatagcgatgaggatgacgaagacgatgagtgaatggctcggaatggcataggtcttgtacaaatcacctcaggaagacggttacaatgtaagcggtatacaacacaagcatcgctacaccgatgcttctcttgaagagtccaaaccagaccacagtccacatcagaagcgaactagcaacgaccacgatgacgtctacccagatccatctcattccctttattcctatgatcctccctgcagcgttacctgacgtgaagggcaactcccccgagacggtccagacgacaccgagcaccaaggtaccgaggaaaacgttgctgccgacggtgttggcgatcaagacgccggtctgactcttcctgccgctcttgtaagcgacgagcttttcgggcaaggtggtcgcgatcgacaatagagtcaagcccaacgtcgactgagacagactgagcaggaccgcaagggaggaggttgtgctggacagcagatatcccgatagcgataatatcagggtcgatccgatcaacctgatggtatggtgagacgtggatgtaggtcctttcctctgtcctaccgcggagggaggagggagcgagacggagcgtatcaaaggggacctctcggtaggcgttcgaacatccggcgtcaagctgcctcggggtaccagtgcctggatacgtcgatcgacacccctggcatccaaaagatcctcgtcgtccatctcggaatcactatcggtatcggaagagtcactgtccgagccttcgggcggcgtgactgaccctcggtagatgccgaaagcgataccgcctacgtagaccacgaaaaggcagagcaagacgatacccgcccatttccccgctgactgtgccctcctagcctgtttgatagggatcccgacttgtagccctcgtaggatccatccccagccgggtccagcggcgatcaagacgaagctcagcaagagcatcaaggatacgtagagccgggctgagaacatctcgttgttatcgagcggagctgggcggaacaagagtccgatggaaaatgagccgaggatgttggcagtcatggagccgatgacattcgacacggctagggaagggttgccattgctcaaggatgagacgacgacagccagctgattgatcagaatagtattagctggtgcaagacgtaaggatactgtgctaaacgtacctcttcccactcggctccggctgtcaataagcctacaaggattgtcggtaggccgagtctcttggcgacaatggtcgtactatcgacgaacacgtctgccgaccgttcgagcatgaacaatgcgatgcaaaagacgacgccattgagaaccccccgaacggcgggtccaaggtatggcgaatcaatgccgggtaacatgatgtagattatcgatcaacgttcggtggtgaacccaagactttcagccgacatgagattcaggagagagagatctgtcctatgacttgacgtcaatgtggttcttccgactggtgcaggagagactcgactatgtcgatcggggagtccgactgcgaaaagcggagcgatattcgtgtgagcatgcattacggtgcagaccacgaatcggcggcgatcgacgggaccgtttggttatgacaattaactgggtagcatggacggatgctaattataaccctcgagagccaaattagcatccggtcatctcggccgttattttgtgaaaggcctgttcagctatcgcaactcgcaactcgcaatccgcaatccgttttcgtctaagatctaagaccgtatgtgtatatctgcccaagcggcgtaggaagtagacggcagtacgagggagcctcctcaatgggtttcgagagtactccacacattcgttgcctgcattcaggagcattgacatcgcgatcaaccaaccgctgcgcgtcaagccaaagctagctctgatcgcctagacagtggcctcaaggacaacatcaccgatgtgtccgccaggaaagaagagtacccgattgagagtttgcacggctcattcaaagttcgtctaatgatgcacccgcatagttttactgagatgtgaagaccgactttggtgccgcatcgaacccacacgatacaatgcaggagggctgccacgatgtcaggtcgctcgaggtgtcgatggatttaggtgcgataacgaacaaccaggcagtcgatttgatgtctacctcaacgctcctttctccgcttgaagcaaagaaaacgttgagaactgcattctgtctacgcacgacgaggtaatggccggggtcctgcatgtgtcaacgttcctcctgcgaaagggcgtccgttgatattcattgaaagattccaccaatcgtcatttgcaatatgacaacatgataggtgttgagggccgggtggaagtaaatagtaacttggctgtcttgagcgacgatatagcatgcagaggtagcagctcgagagacgagttcatcattaaaccgacgaaaccccggtgctcaagtgtcgaatccgctttggggatcgggaattcacccggatgacccgatcttgtcttggtggctcatgaccccagagttcacgagttataaaactaacgaatctggagaaccagggccaatgcgacgacgataaacggctcgtccgacacaggtcgcacgtttgaactagatcgacgccttcggcgcaatgtgacccgcttacaaaaagctccggtccggcatcaaatgtagaagttgatcttacatccagctagcagctagcaacgaagtcgtttggtacgaatcaatctactatgctgcctttcttatagagtcgagcaacagcacagcacgtttgttaattccattcaagtcgctcaaactcaagcttggctatctgttatctgcaacagtcgccacgtgcgacagatgcaaaaacattcggtgtgaaagccccacttctagcccaaacgatatataatgacatctaaggaacccgaacgagatcttacgatacaccatggagactttcccaatcagcctctctcttctttaccgacaagatcctgcaaacatgctttctcttgtcgttcccgtcgcactcgcgacttctgccatggcagcctcggttgacatgtccgttttcggacctcgctaccctcccaaatccaatgcctttagctcaatcgaggacctcttgaagggttcgggagctccgggcatctacaactcttcttccgtccctgacggatcttatggagtctataactggtgcaacatgcctcatgttcgaggtcagtctagagcaattctgcttactgtaaagttcgctctgacatccctttgagaaaagccaaccagtaccccatgccgagctcggaatatgagctggaatatgtcgaggtcattcatcgtcaccataagcgtactccctacgcaagcaacgtgtttcccaaggaagacatcacctgggactgctcttcgaacggtcctttcgcctatgctcgaaacgcatccggtctggctaatgatgtcgctccagtctcttggcaaggattccagaacgatgtcaacccgtgggcagctgcagcttcggtaggtttcgagggttccagttgtcagttcccccagatcactgccgtaagtcagctcgctcgcactcagccagatgaggctaggcttatcttctacatcacggcagacttccctcgaagacgcccatgttcatggcgaagacctgcgcgaggtctaccacgacaagcttggctttttgcccgcccaacacaactactctgaagtggctttcagggtcacaaacaacgtgagcttgcctgcgattgcctcggacaggatacaaagctgagcgtgacggctcgacccgtctttctaggtcatcacctctcaggtccttggaggagtcgctaaaggtctttatcccgacctggacaatattgcagccaacatccaggtacgtgcataatggagtgtccatgcatcaacaccggagctgatgaattcgatcatgatgcgcccgcagagctcggcattcgactcgcttgagccgaccttctcttgcaaactcgccagtcagctgagggcaaactacactggctcttacgccaagtggacggaccacttgaaagcttcttcagaggtatacgacaagttggatgccgtctctggcattccccgagctgatgacggcgggtggcacacgtgagtaaattgatgaggagcatcacaaaagctcgactgaaacccgcattctgcgcatcgcagctctttcgaccagtaggtgaaactattgacacacatcagactatcacactaatctcgtgccgccctagctattatgacaatttgagcgccaaacagtgccagtaagcaaaatccagcacgacgatctcgcaattctcaccgctgatcaggtcgatcatccagcctgaaggctctgccgtgcaactcgaacgggactggtgcttgcgtcgatcaagaacttgctaataccgtttacaggattggtcaatttggtaggtaccccttgcgttaccgttctcagccaccaacgctcatgacgtctgctttcgaagaatactcctaccaattccgagatgcagacaactcgactgcctactccgccttgaggtccggaccctggatgctcgaggtcaaggaccatatcgagtccaggatcgcgggcagccctgtcaagtaccgacacaacatcgctcacgatggttcgatggctcccttgctgggattcttgcagatcgaccagatggtctggcctggtatgtcgatctgcctgcgattcttgacgaggtgtctgctgacagtccatcactcgacctttttacgcaggtatgggatccgagtgagttagcgatccacccgaggtgcgtcgacttttgctgacgagcgttcttcgatgtagggttgtctttgagctctggaagaacgccagcggtgcccgatcgatcagggtcctttggggaggtcagcctatcaagacgtcgacgcccttgggcacgctttcgatggttcctctcgacgactttatggcggttagtggtattcgggcgctcaacttccaggctaggtgctgacaggcctcatttccactttcatccattcttcctagttcttggacgcctcgatcccccaaaacatggtagagctctgctctaaatccgcttaaacgcgcacgacaagcctcatctttcataatatgcgacatcgctgtatgcagtcctcatgttgacgacgagttgaaaggatcgcctcgtgtgatccgcatcccatgacaccctcacccctaacgccagggagccgctcggcccatctgccttgttcttccgaactccggtatcgagacgacgttgtcaagtctgctagttggtagatttcttttgcccggactgtcatccggtcgctcggcctgcggatctgcttcatcctcaattggccggagcaagaagagcttgtatacggagggcaacagctgaacggcgacacgcttgcctttttgcgcttgcgatccaacttttcttacagatcgctatctacgtgcataggcctctacttgggtactgttgtggatagccgaagggtcgtggaatccatcattatttgtttcacggccttgcgaatggcgcctcaaaggaggagtagtagtagtagtagtagtagtagtagtagtagtagtagtagtagtagtagtagtagtagtagtagtagtagtagtatgagcacgctgcgcgcggcgagtcgtatcctcgcttccgctaatctattatgtgacctcttcctggctgtgcctgccctggcctgcccccgtgcccccgcttggcgcttgccgcttgatgcgcgtcgcttttagccgatgatgatgatgatgatgcctgcctgatgcatgctcatatagcgtcgatgatgtacgaggttgcgagctaaactaccgagggacagtttacacccgaggtccgccggaacctcaacctagagagtgacggatatatccaaaggacatcgtcgtgctaacgtatagactttcagactgtcacgctacccaatgcatcccactcgagggtcatacacgtatcctgagagcctataaagctaaatcgcgctttcctcacgaaaaaggctacgaacttacgaccggtcgacccacacacacgccttcaactcagattgaacccctccgactcacgtatgaatctggacttgccgaatatccgctaagatcgtggatctcagccactgcctcgcaagatgcagtacctctcgaaagcttatcagtactgtgagtccaatcctactactactcagtcgttcgttgaccgtgctaagcgacacttgcctcgaaccagactcgggcattaacccggctaccttatccggggcgatcgacgtcatcgtagtcagacgtcaaggcgaggcgagtttgacctgcaatccttgttggactactgctagcaggtactgatcaagcgtttggcacctctctctaggatggcgaagatatttacagctgttcgccctttcacgttcgattcggcaagctccaggtattacgagcgggagagaagcgggtacgtcacgactcgcgagcaagccccaagcatatcgttgctcacgttctatcgacccatgccctgaccgctgtccatcaggtgacgctgaccctccctgataacctttcgagcgagaatggccaccgagctcccgtctggatgaaggtcggcgaggcgggagaagcattcttcgtggtcgagacggatgcagaagtaccggaagaactgcagaccagtccggtcatgtcggcgacacaggtatgtgcctgatatgcagtgtcaaaccgctgtgatccttgctgaattatattccactgcgatgtaggaatcgcctccggcgtcgccaatcgacgaggaggacgatggaaaggtagactctggggacaatgtcacgcagcaaccttttggacaagacggtcgagccaacatgcacggcgaacctgaaccgttcgagctggatgccaagcagcagcacctgccacaggaaatcgagtcgattccaagggcaaggaggaattcggaaaggcgaggatctctaccgacagcgaaagccgccatcttgaataacgccaaggggcattccggcgagccgggtgtggagaaacatggtggaccgtcgtccgtctcgccttcttccatcttgaacacggcttcatcttacctcccgtcgttcttgtctggaagcggcgaatcctcgacccccgatgatgaagagcatggcaagaaggaaaccaagtcgaagcagaaactccctggtcctctgcctccgaacccacttcgaaatcgttccgaaggacgatccgagagctattaccatcacgccgagacattgaaggactacgtgagggatcataaagcgcacgttcctagcgtcagcgtcggtctgggtaacctcgggctgaagcgtgagaggaaaggatcgaccagtagcttgaaaagcttggagagcccgacaaattcgtctcggaagagctcgggctcggaccctatggcgacgttgcaggataaggccgacgcccggttgcccgcgctcaaggatggagaaggggaggcgccagaggtcttgtataacgaaggtcagtcgctggaattcggcctacaggtggaagattattgacaccgtctctttcatcgacatttctagacgtcgtgctcgacatggctgggtaccaccgtccgaccgatgctgctgactcgcctgatcacctgcggaatctggtggagaaggacccagctgatcaattcggcgagctgagtctcgatgtcgctaccgccaaagaagacacaccggaagctagtgagaaacgtttgagggacaatatgggtctcggcgaagtgctcgatgtcgagcgtaacgacggtctggtcaaattcgctcaagatctgctgctgagtgccggcgcaatcacggctgaggacagcttgggaaagctcggtctgcccaagcgatccgagtctgacgtggtttgggaaatcaagcgccgcctaagttttggtgatgcgcccgagcaagacgagcaagcagatgatattagggatctccctgaactttcgtctcgctcggggcagagagctgggttcaatcgtggtgctagcgaacctccagaagttggttccgcacagaccacgacttcggaatacacctgggaatggggcgggttccctaccaagacacccgcagaagaagtgtcggatccgctacggcacaaccggatcaactcgctcatcgagacggaatcgccgggtttgatcgagcgacctagtctcgcagcaagacacaaggctggggcaagcagtgtgtccgctcctgatatcaaccggatcgaaggcctgccatcgaagccttccgcactgttaccgcagtcaaaacatctagagaggcagcaaagcgcgccgcctgtggtcggtcccacgctgtctgcattggcagctgcgccgagtcagtccgacggtggggttctgaagaacgacgagggggacgcatacaagttcatcctcgatatgatgggttcgactcacgttttcgagctgggtctgggtggtgatgtgctggccggcgacgaagtcgaggacaatcttgacgaggtgagctggggctctagacgacagggttgaggtaggggctgactgatcctggtcaccagatactggccgacgttttcgaagtcaatcgcattaccttcaagcggttcgtagaggatcccaaggtggtcgatcaacccgatctagtgatccgctatgactcaaagtgagcgatccgccatcagttgcttgattagtacgcttatactgctccgactcgagcagattcttgacctggcagaacgcttcacctatccttgctgcactcgcagtctaccgacgatctttggtaccgccagtttcccctggtggcgtcaagaccgaagcattgccgcccctttcttcgatcggcgtggatgcagcttccgtcgatgccaagggttctaaaggatatggatggtcgaggtggtggaggcgtggtcagagtgcaggcataccgctcgaagcggttacgacccctgtcactccgctagtgaggtcggcatcgcctggcattccggagcaaacgcccaaacatgaatccggttcgagcgcaaaaccggatgtgagcttctaccaggtctgcttcagattgttagcatggctgaatcacgaaatttcgcaggccgagtcttcggaacacaaactgtattacgcaaagacgttgcgattgacatcgagccaactcgtgagtagatacgaatcccaggagcattccagcgtcctgactttgccaactacgtcttgaattgcttttggttcagagcgagctgaaactcaagcccggcgccaaccgagtgatattctcggtaaactcgtcatactccggagtcgcgcagtgttccgctagaatcttcctatgggaagagtctgatcatgtcgtgatttcggacatcgatggcacgatcaccaagtcagtacagggttcctcacccaatgatacagggttcctcacccaatgataaagccgatagctaatctcgacggttcagatcggacgctttaggtcacgtctttgccgccattggacgagattggactcatcttggtgtcgccaagctatacaccgacgtgtgcaataacggttacaaaatcatgtacctcacttcaagagcgatcggtcaggcagattcaacgcgagactatttgaagagtatcagtcaagggaaatatcaattgcctgagggaccagtgattatgagtcccgatcgtcttttcacgtcattgcatcggtcagtgctggcattcgcaggcgctctctgatgactcgccggctaaaacgtttgcatctatagtgaggttatcatgcgcaagcccgaattgttcaagatggcatgtcttcgggacatccagcgattgtttggcggatctcgcagcgcattttatgccggattcggtaaccgaatcaccgacgccatgtcatatcgtagtgtcaacgttccaagctcccgcatattcaccatcgactcgtatggtgaggtcaagatggagctgctggaactcgcaggatacaagtcttcgtacatccacatggtaggtccatgagaattggagaatcgggataccattaaccgtccctttcttcctacagaccgacttggtggaccaaatgttcccgcctgtgcatcgcgaagtgataccggaatacaccgacttcaactattggcggccgtccatcccggatattgccataccagacttggcaccgcctcaaccggtatcgccagctctgagcgcaacatccgatgcttcaggccgattgagtatgctggggcgattgaccggcattgcgagacgagcctcacggcagactgtaggcagcacggaggacggacgcaagggcgcgtcagcgagctcgcggccaagttccccgttgtctggcccgttggattacgggagcgactatgggtacgacgaggatgccatctcggacagaggcgattttctgcatgattctcgacccagcagcatgcctggatcgttcgaggacaagggtgaatatctaggcgacgaattcttcgatcaaaggggtttccaacgctataaagaagcgcaacaggaccagcaaagccggccccaacagagggaccgcactgctggtgatgccgatgtcgatctcggttctgatcacgattatgacgaccaataccagcaggagagcgaggatgacgacgtatatcccgaaatgtttgacgacgatttgttggcgacgggcgaaatgtcaaaggttccgtactagtactgtagaccagaattccgcgcaaattgtatagcatgtgctagtaaatgaaatgatgaatgtcacgagaggtatggggcaaaagacaaagtgaacaagcccgtgattgtcgatggcattccggcgctgttgcttggctcttttagagaccttgcacaatgcgacgaaatcgcaaggaatacggaccaggcgcacgagccggagagggacgaacgcagcagtaatagctttatcgagcggcgtctcgatctatcaatcctagcaagctccgctcgtcacctcgggtcgccattgcaatcaacgagagaagagaagaacactatacatgcccatgtatcaaacattacatccgggttcaagcgcatagttccatgcggtatacaaatcagttctcgctacagccggggaatcacaaagatcagcgttgagatttacgagtgcagcatcgcccgatcttcccatctactcacggaatgctaatatgtcacaaaggtaagccaaagcatgcacgtaatcggatatcggatggtctgcgttagccttggacgcatcgaatcagtgtgtttcggcgtgagctcaccggaaaatcgtgaattcggtacctatatcgagcacgacgacggtcagcccatctcctcgcgttgcacatcaagacgctcaaacagactcggactcgcccttgaagtaccgcctgttttcggaatcgatcaagacgaggttgaggtaataccggacggaaaacttcttgttgacgtccctgaacgtcggtgtcaggtcgaatcctcccaagaagagccggatagggatcgtctcgcctgcggaattgcccgaaaaggtgatgagcagcgttctccagcacggtccgacacgatgcgacaagattttcgatttcatctcttcggggctctgcgcctactcacctcgagcgggtgcaccgtccatgatctcaaacttggtgatcgtctcgctctcattctgcatgttgggcgccgacccggtcgtctctctccgaatgatggacaactccatgtgttcgatcttgatccgtacgagcaggaaatagattttgcccacgatcacgtctttcaggtgatacctaccgtcgcacgaccgcatgcgaaagcatcagtcccgtgatcattcgaagcatagatcgcatgactaggacgacgatcgaggacaatcccggcggactgacttggctttattatactcgaactcgatgtgcaagcaatcctcgatcccgacctccatcttgatggccatgttcgaatccgggggcatcctaaagctgtgcacccaaatatccttttcctcgatgacgtcgcccagccgtcgatgaatcgtacatcgcagaaagtaccttgaagaaccatcgtcgtcgtcgtcaggaaatcagccttcggatcctctcctcacacttgggcgcgagagtcgagatgcgtcgagagagcacgaatcggacactacgctcacctcagcttgacgttgatccctgaataactctcgtactgcttctcgacgtttttaaagttgaaatcaaacgtctgggcttgtcgcatctcgctaggagccgccagttcctgagctagggagaggaactcgtagtgattccctctagagaacgataggatgggtgagcgactcgaagagttgggggtggatatgaagggccgatacccaccggtcgtagtacatctctgacgtcacgcacggtacagcacagcacagcgtagtacgatatcgtccagggttgagcaccttttctcgtatcgttgaacaacttgattcactcacctatgctaccgacgagctctaaccggatcccatcgtgttgaagcttcttgccgtccttgaccctgaccgtgacctgttatcggcgggacgggcgtcgatacgggatcacggatcggcacacgaggatgagctgtctactcggacgtgctgatcgatccgactctggactcgcctgtccggacacgctctccccatccagatagactgcacacgtttccttcttgtccttttcgcccttttgctcgatctgcttgcgtccctcttcgccatgcaggttgatctcgatgtcgaccggggtcccgccgaatccgaaaaaggccgccatgtcgggtcaattgtcgtgacgactgaggctgctaggtggttcgacttggtctatccggcttgttggtggtgacgttgttgatctgttcagttgaagttgacaccaggatggaacgaggtcgttcggtgaccatgaacccatcagtctcccttggatagctagctgctgtattcatcatcatcacctgtcaacctgacactttaatcaaatcccatatgcacaaccatgcatctcctcatcatcttctacagccccctaccctctttaccgactttaaatgaattgtcatatcatcattcaatcacatataaacatccacacgcacactaccaccctcgcaagctattcatcatggatatcctcttgtcagagatcagcaacaagcgtaaggacctcgccgacccagcgggcagctctcgacctcagaagtatatgcgaaaggcagacatcgagcgggccaaagaggaagaggcgaggaagaaacgcgaggtcgaggagcaaaagaagagggaggaagctctagcaaaggaaaaggacaaggcgagtcccccctccacttcatctcgaatgattgggtcgtccgggacgtaatcgagctgacccccccgtgacgacacgatcaacagaacgctcgtctcgccctgatccggaatcgatcgacgacggcgtctcaatccccggctcctgaagctcctaaagccgaggcgttcaacatttccgcctctgaatgtatccgacgactccgggcaaagggtcaaccgatcttgctcttcggggagacggaaaaggaacgaaggctacgtcttcgagcgctcgagttgctggacgaacggggtggacagggggggtccaccaacgagtttaaaaaggctctcgaggaggctcaaaaggccatggattacagggagattgataaccgaggcaagggcaagggtaaaggcagggaaggtgatgccgagggagaagacggtgaggatggcggtgatcaatctaggaggaaaaagagggaagagccagaagtcctcgacctcgagctcgtcaagaccgagcctaaaaaggtttaccccttaatttactacgcgttgaaggtaggtcctgctgctcagaagtgcgtaccctcggggcgtcatcatggctgataacccaaacccctcgacctcgtgtgttacgcagggctggctgcaggattgggaagactcgctggacgacagaccaggcaagtcgcatatccccaatcggacccccccgccgattctccaacgaaatgtacaccaggcttacccggtagcgttcccctacagacgtggtcaaacgatccgtacaaggacgaaacgcagccgccactcaggtacagaccgctcaatacctgaaacccctcttcaaagccttgcgacaacgggtgagtgcggtaccgagcttccgtcctccctcgagcccgaatccgtactcatcgactcgggtgcacctcacaggaccttgagcccgacgtcttgcgattactcgccgaggtcatccattacgcccagatcaggtcttatcaacgggcaaacgacgcttaccttcgtctgagtatcgggaacgcggcgtggcccatcggagtcaccatggttgggtgagcggtcgtgtgcgagctttggaaaggtttgcggacgaccaccagactgacgacaagtcgaccgactttcacagtatccacgaacgttcggctcgagaaaagattgggatcgactcggtggcacatgtcctgaacgacgaggtgtcgagaaagtatatccagagcgtcaagaggtgaggagggggtctcgcgagcagagagtcatcgtcgacgagtcgagctgacgaccgtgtcccatcgattcactcgacagattgttgacgtttactcagacgatccgaccgcccgcagacgtttcacagttgatgggatgatgcgttcgtggccttgcatgtagactagctgttgtcacttcgtgtactgtacctctgtctctttcgctgatgcgatatacacaatgaacacgacattaagactcgcacgcatggtccccctgatcttggtgtccattagacgacgttgtttgaagaagaaaacagaccagccctggccgtgatgtatatttgacagacacacaaccacatcgaacaaagacgaggcggaaagggagaaaaaaaagtagaaacacgcgcgcacgagagacgacaaaagagagacgggggtcgagctagatgatcagctctgacgccttgatcctggtcctttgatcctcttcctccgtgcacctcttcgagaccgatcgcaatcaagcggtagtctcggaaggagcaggggcggcggcctcggtggcaggggcagcagcgtcggcggcgggggcggcggaagcacctgcagcggcctcggcggcctcgtcaccggaccattgggccaagacggcgagggcctcgtcgaccttggacttcaaggccgagggctgctcgaccaagtggaggagctccgagttgtccatctcgaggagcataccggtgatctttccagcgagctcgggttgggtgctaaatgcgcgtgaaagaagagaaacacgacggtacgagtcagtcgtggtgcaagtgaaatgcgcgacgttgccattgttactcacgcaaagatcaaggggtagatggcctctcccaacatttgcttctgctcctgaggagcggccctggccagagtagcggcgttgagcttttgaggagcctgctgagcctggtcctgctgctgctgctgttgctgttggggacgagcggcaccctggggtccaccacgggcttgagggcccataccggcgggaccggcgggggcaccgttaggtccaccacggggtccaccggcaccgggtcgaggaccaccgggctgaccgccacggtaagccgggttgacgcctccgtaagggacgccggcggggggcatgccgtagtaaccaccggcgggtccgcccatgggttgaccggaaggaccgaatcgagcgttgggtcgacctccgatcattccaccggcggggtaacccatcatgggtccaccacgagcgccaccggcgaaagcgccgggaggaggggggtagtacatgggctgttgagccatgtaacctgcgggtccacccataccggaagcggccatcatttgcatcctcgaggcgttcctcgcggcgatttgagattcgagggcggctcgtcgagcctccttgcgctgagcgatggtgacaaagaggggcttggtgccgatcatcttgccgttcatctcggcaatggccttttgagcctcgtcgggcgagctaaagcagacgaatccgaatccacgcgaggtggccgtcttgtcgtcgcgcatgaccttgcacgaggtgatggtaccgaaagcgtcaaactcggctcggacgcgatcgtcatcccagtcgtctagaggggtgggtcagggcgagcgtcacgtcagtacgagtcgaccacgttgacgagggacgcccagactcaccgttgatgttcttgacgtaaaggttgacaccctggttcttgctctcctgctccatcctcgcggcctcgtggttcctcctcaactcttcgtcacgctcgctcctcttttgagcgcgcgagacgaacaatttcttgcccttgaaatcggtatcgttcaactcgtcgacggcgcgcttggcgtcttcgtggttttcatagttgacgaaaccgaatcccttgttcttgcccgactcgtcgaattggagcgcacacgagacgacgggaccgaagggcttgaagagaccgtcgaattcgtcctgggtggtggctgcgtgggggcggggaggttgacatcagtgatcgcgcgacagggcaaggacgagcggacgagcgaccggggactcaccctcgtcgacgttcttgacgtaaatgttggtgaaatgagccttcatctcttcgaccttgctcatcctctcctttttgctgacgtggtgtcctacgtagacctttttgtcgttgagcaacatgccgttgacggccttgatggcggcgtcggcggcttcggccgtctcgtaatggacgaacccgtaacccctggaacgaccgttctcgtcggtggcgaccttgcacgagaggacgttgccgaacgcggcaaaagtgtcgtggagggcctatagcgcagcgtagcgtcgacgacggacaacgtccgagtgtcagcgcgtcgaccgcgacgacgaccaccacgacgacgccgcaacgcaccttgttatcaatctcctcgtccaagttcttgatgaagatgttgcccgcactgctcttcctcaacgccgggtcacgttgactccacatgatcctgcacgccctgcccttgatcaagctgtagttgaggctatcgagcgctcgttcaccgtcggctccgttcaggtagttgacgtaggcgtatccgagggaacgacgggtgatggcgtctcggcagacccggatgctatgagcgagggcgacatcgacatcgacagtacgaaagcggacggggaggaaagaggtcaggcgagtcagtacccgggggcaagacttttcacttgacgctcctcgcgactcgggactcgggactcacctggcgacgggtccgatcatgtgaaagatctcgaacaacatggcctcggtgacgctcgggtcgagttcaccgacatagagactcgcgctggccggggcggcgttggcgttggcgttggcggtcgagttctgggtggacgactcttgggtctgggcgggtttagactcttcctgggtctgggccggggccggggtctcggggaccgaggtggtaggcttgttgtcggtctcggtagacattatgtaggagttttgaaagtggcaagtaaaagtagaagaagatgttgtttcgaaagggagagttcgtcgactagtaggtcagggacgaagtggtggtgaaagtagtggttttgaaaaagttgggtggaagatgtggggagtgcgggtttttctttttctctttttcttcctcttttgacgtctaggtttatcgaggttttagggctggtctgcgatcttgtcctcgtgctttctttggggggataaggggggaaaagatgttgctttttttgtgggttagattgagtttttgagaaagaaagaaagaaagaaagaagggggggaggtggacgacgacgacgatgtcgacgacgatgatgttgtgtttgatgatgtcgataagggaggagtgacccgggtcgcacaaagggagggaagagtgagaatggaaaatcgagagagagagagagagagcgagcgagcgagcgagttgcctgcctgcctgcctgcgcgcgctgctcgctcgctcgctcgcgagatttagtttcaaactttctcacgcgtcacaccggggtcaccccagggtagagtaactctgtgtactcactggcctgccccctcgtcgtcgtctacgatctggatcgagagtgtggaggtcgagcacccacccacccaggctgcaggttcaagattacactttggacaccttgactgttcaacctcgtgaatgtcattgcaatcgacaccacaacaaccaccacgacgacgacgacgacgacgacgacgacgacgacgacgaccacgatgacagaaccagaccccgaccttctctccccgatccatcgactcccccccgaactcgtagactcgctcctcctctacgtccccgcagatcaactccagtataccaccctcaacctgaaacaagtgttccccaggttggccatcagcgagagacacttgttcactcacctaagagtcggcagaccggaacaactccgaccgatgtgggaacgattgaggagagaaaagtatgatcccgttcatgatcaccaccaggaccacgacccgaaccctcactcggacctcgacgtggctcccggtctcttgcgccacgtcgaatcattcaccctcgcctgtttcgcaggtgacgccgacctgatgaacaacgtcctccgtcttatcccccggatcatcaggctctcgctcaacctcggtaccaacttcgcaccggaacatctcgccgaggcctttcaggtcgagaggaagaggatcgaggtcgtagagatcaggttcagaccgtatgtggatagggcgacgtattaccagtttttaaaggtgagccaagggattctcgggtcgccagggtcgagtggcgagtgtcgagctgaccgatgaccgacgacgggccgggtagggatcctactttgacacggcgatcgagaccatcacgcggacgtggccaacgacgccatctttccgccacttgtcgatcgtacaggacgtcccaccccggttctcggtcccgcatctggtcaaacggatggccagggtcaagttggcaaaggagaaacaggaacagaagaggttacaacaggagcagcagcagcagcaagagcagcacggaggacacgatgattcgacgtcgacgtcgacggcccgaccagacttgctaccatcgtccgacgacggcgaatcgggatccctctctgaatcgtccgacgacgacgagacgtgggacgcgctcgccgacgctcacccggtcgaacccaagacgggttacaccggtcaaggtccgttcccttacctctcgggtcgattggccgattcgaaaccgagcacgtttgcccaacccgtcgtctttcacgacatcacctgcctcgcccggttagcccgcgcgccggcgagtcggcacgtccgtgacttgcgcttacgttgcccagggagggacgtcgtcaagacgctcagcgagggcggagataccccgcacgacgccgaggggagacgttggttcccccggctcaggtacctcgacgtctcgacctcgaacgtcaggttggacggttggctacccgtcctcttgcgcaggtacaacaagctcgaacacgtcgtactcgatcggaccaacctgttcggtttcagaggcaaagattcgggtcagatcttgtgtgcagatctcgcgaggatgtgtgcgggcatggtaggcatccagcgcgcaaaggagagggaacgcgagttgacgaggttagaagaggtccagaggaggagagaggccgtcctagagcgcgagaggcagaggcggatctcggcagagcggccgatcagggaggagaacgaggacggccgagacgacgaggacggggacgaggacgaggacgagctcgagtttgatgacaatggcgacccgatccagagaccgcctcgccgtcgacgcgctcccgaacccgaacccgaacccgaacccgaacccatccaataccgcccgatggaacgcgctcgacctcgacgtaatcgacggaccatcgccgtggccacgttctcggtccgtgaaaacagtcgtcggaatcgcgttcacgaccgtgccaacgtcgaagacgacgccgatctcgtcatcccgccacctcaatccgtgtgcatggtgttgccctcgctctcccgactcaaatccgtcaacctcggaggcgaggcgttgccactcgatcagaccaaattggacgcctgggacaaggggttccgagccggttggaaggacgggatcgacaaatcgttcgagtgggcggcaagagtcggagagcggtacgacagggccgtcaaggcggccgagacgtggaggtcggcagaacagcacgagtttacgcaagggtcgtcgagcggcaggggcggagcaggcaaacgaggaccttcgcccttgttgcttccgaatgggaaacctcgaacacggccgccactcgatgtcaggttgtacagatatccctggccagaagagaccatcaacgaagaggacgaggtgcccgattcagaagacccatacgccgggctgatcaaggtcgagccggacgagaattggaaggacgtttacttgcggtacctgggcgaagccgaggcgaggtgtgcggccgacgcgaccattgtcaatcaggacggtggtcgcgtcgagcgtggatcgtccgaaacgtcgtcctcggggccggtcctatgctgcatccccgactgcgaggggccgatgcgacgcggtgatggcggagagcgggtcgacggacgagccgggatgaagctcgtcaacggtcacgtcgtcatccgaggaggtttcaagcacaagccaggttgcgggcacggttacgcggccaatgtctggtcgaatcaggtgtagggagggggggcggcgacatacttgatgaatgcataatgacggggcgtgcgaatcattgcgcctcgtgcatgtcacattataacgaaaaatttgtaatgacactgatgattgcattgtgcatctgttcttgctttcggatcgaaccgaggtccattcccatccgaggcattggctgcatttcgttccatacgtcacgatgtccgagctttagcttaggtcaccacataatcgaccgcctgcgatcgtcgtactggctttcgtttgtctcgagctaaacagctggtgttcagcacgtcagcttgccagacatgtaccctcgttgcagctcggagactcgtgtcgtgctccccctcatcgaaagggtgggtctggagaacgcagatcgtgtaacgccgactcgtaaaccaccaaacgtgaaacgcagtgcggattacccggacgaaaaagtcgactctgtcccccaaaatcaagaaaaggagcgcgatgcctatggccactgctgctgatcagcggccccaatcaagaccccgatcaccaggaccagacgtctatacgcgcatatctacatgaattactacatctatcactgtggacagagctcgatccctagagaccctccatcgtcgcactccaggcttgctcctcccgtttcgctgtcgttcaagcacgcagtggacatcggagctcgcggcaaagtcaagtaggcgtcgtttttgggggacttgtctccgacatctatacaggccgcggcatggacaacacgagctcgtacaacaagatgatgcaatcacagacgcatcactccatctcgacgtcgttgtcaacatcttcgacagtagtcacatcgaaggaccgcttgacgacacccttccacatctcgtcgttgatctctttcgcccgcctcaattgagcctgcagcttgagcacttcgccttgcaagtcctcgatctttccctgctggccttcaccctgatccgtggattgcgcctcgatcgtcgtggctgacccgcctgtccgcgtccacacgcgatcctccgagtcgccatcgtcgtcgtcgacatcaaactcgtccaacacgtcgaattgactcttgggtcctagcaggatgccaatctcctgctcgtctcgctcctttttgcccacgcgcattcgctcaaacggcttgacctcgatgacgggccaaccttcctccttggcacccatctcggcgtaatttccgagagacaggtggcctacgaggtcgggcggtcgagagatgatgctcaggtgcgtgatggcggacccagagtgggtgttgatcgttcgcaaatgttgatgcgagggtagcgcgtgcacgtggatctgtccagtcgctgttcccgagacgagctgggcttgcgttgccgacagggcaagggtcgtgatgggtacactgcgacgtcggatgggggtcagcagaggtatgcgattgacgtgtggaccgacgcgtaggctcaccctaatgatatcgatcctttggccttttcctttccttccccgtctgccatcaagatctcttcgctcccgaccccacctccgcctacagccaccgttgcttctgccacggccacgttaccgtaaacggcctcgtcctcctccctcctcccgatctcgcgtctccgtcggtacagcttgatatggtgaatatccccggtctgcgtgccaacgtggaaagaccgctcaagtggatcgatcgtcagtgccgtcgggaattgtgaatgaggtaatttgaacgtggtgaggagcgtcggagggttcaacgcccatatctagcaaagggtatgggtgcaagcgttcagttgatgatgaagactttatcgggcgaatcgtttgcgaggccgttcaccttgaccgttccgtccatacttcccgtaaacaccctgccttctacaccggccggaccacctcccttgccgacccctacgcagacgacggccaggctgtggccctcgagcgcaccccatggctctggcaaggcgttcatcaaccgaggatcattgtccaccaacctcgtgacgctccagacaaacgtcgacgagtcttccgacgaggagacgaggagttgagatgtaggggaaaaggtgagggtgaggatggatcggtagtgagcgtcgaaagaggaaagaaggagacccgaggcgatctgcaaatcaccgacagcgtcgaacagagttgaatgagcttgcgtataatgacaacgtgacacatcgactgacctcccagagatagagatgacccgtcgagctacctcctgctgcccagagaccgttgggcgagaccgtaaagcacgaaagtttctctgggagatggatcctcgattgaatttggtcctacgatggtccaaagagcgacaggctatagcgtcaatgcgggtgctgcaacgaaccgttctgcccagggctcaccttttgccatgcccagaaacataacaatgccttgttctcctgactgacaaacacacctcccccttggccttgacgacttggcactactccgacattgtttgaaagacagttcgacggcttgaaagagtgaatttgagtgctcgactgaaggtcgtggagggtgatcgaggagggcgagttgatttgcgtgttgctagaagtcgaggttgtgggcttgcccgaagcgctcggctggaacgggtaggcggagagcgaggaggtggagaggatgacctcttgaggtccggacatcttgtcgatgaatggcaagacgaggctgaaggattgaaatgttgacttggtgttatagtcatggtgcaaggtggtatgatggccagtatgcatgtcaaatctactcgttcccgggaaatttcgttgtcgatttccgaaatttcgtggagaccccgcgtggaaagtgacccgcaaggtggtgagtgagtgagtgagtgagttggacatactcgtaacttcctatacttgtggacacctctcgccgcctctcgacggtactcgcacgctcatgtagacaggttttaacaggtcgaagcactacggctgttagtcatgtcgaaattgtcaccgctcaccctgacactattggtcgtcgcaagtcaggcagtcaatgccgtgacctgcccgtcctccgccaatgtcgtctcttgctcagcggatgttgcagaccaagaaccatgctgcgtaccttctcccggaggagcgttcctgttcagacagagatttgaagctgacaagggcgatgagggtagatggggaatcgacgggttggacgtcttagagtacgtcttgaaaacacgctggatctgaatgctacgtcatcattctcgagctcacggtcacgacaacccctcagttgctcatcagccagcgtcctggctaaggctcctagtgcacctcgagcctactctcacgaggagattggttcgttttgtgccacctctcccaagtttgggagcgaatacgagacgtgggaggcagaatgggcagaaagcgaagtcggagaaggtctcgaagagatctgggaacgagccgtgagtgtcctgttctctttcagtggtcccatttgtagatgagcgatccactcaaatatacggctgcgtctcacatgtccgtctttagtggaacacgggcggcaggtcgatctccaccttggaacctcgttgtttcgacaactacgctacgggagaagaagtcagtcgtcccataggagccgtgtgctttgtgtgcgcagcgggtcaagctgacctcaccgatcctgttaggtacccttgttctttgattcgattcatcatctgcacgaatcattggacccgtggcatctgttggcggactctgacgtgcgttatccggcagtcgcaggatcagtcgaagctgcctctgacagggatgttcatttcattcaccttgtcttagatcaccccttcggagggcatcacttactcgagggcggaaatcatcaaggccctcgctggaaagaccggtttcgacccttatgtaagcattcacttccgtttgagttgctggatcattctcgctaacgagaggggaaacggcgaatcacaggtgtcgtgtgtcaacgagacgatctcgaccattttctggccggtcaatgtcaagggaaaattccaagacagtcacttcctcccggctcgaggagtccaggtgtctcacatcgaatcctgccctactgaagggattcagtgagtgttcagccataggtgggttgatatatcgagggacttgcatattgaaccaaccgtggttcaatcatagctacccttccgttccgaacgtgccccgagccgctccttcccacacgtgggatcccatcacccgtccatcccctcgatcgctcagccaagacgccatcgcgcgatctcaaggacgacgcagcgaagacggaggcgaggctgccgctccccacgctgctcatgacaaggccgtcaatgtggagaaactcgggtttttcaagcgcgccgatgagaaacgagagggaggtaaagatcaagaagcaggctgggagcagaaaaaaggtagggtcgcggacgagctttgagagcggacttagtggtcccatatagaaagaggggtgtaatcgtgcgaaaacgtcagagccaacggtggcaatgagtctcgtgcgcctgtccctatcccgatgtttatgccgtgtgttcatagtcctttgtctattcctgccttcgcttgattgtgttggccccgatccaatcgtgcccaacacgaaagcgctcgggaccggtctttttatcatgtgggtgggaatcatagagcaaatattattggttttggtacggtagtcatagtcatagcatggtggtccggccatgctacactcacggtataaagaggtgacaatctatcgaggaggtgttgtgaggtaggacccatgatcaaagccgagcttatgtagtagtctataagccaggcgagtggaggcggcacgctccccctcaatcacgctagcacatccgggcattatgatcgccttgataccgtctggttcttcctcctcgtctgtccctgtggccgctatccttctcgggcgcgcccctgccatcttcacgcaagactacttataaacactcaaggtggcctttcaggccgccaatcttgtggagctacttgcaagcgaccaattgcgaccaaggacggaaagcgaatacaatcttggttgattgtcatgacctcgccgatttggccgatgcggaagtatcagacggcgctcgggctgcactcgcgtgacacttgaatgacacctgggcgacacttggtcgacactttgggcgacacttgagcaacactcgactgtcacttcggatgtattctggtttcggcctgtcggtcgcagggtcgagctcgatgaatcgcttcatgttagctttcgcgcttgccaattccgttccccgtacaggggtctggtcgcgcagggaatgagcatcgaccctccgccacttgctaaggtcttcatcctcttgctaccagatcgaggcactatctggagcggatgcagactacccatcccccaacggacgagtattggtggattctatcaacgagctcaaggtggagcgatcctcatttgttattctcaagcaagaccctggccatctcgcctcaaatctgtccatacgatggatatgttgaacgggaatgatggtttgagactgttcttgttacttgccgtccagtctatttgacagacgcgtaagcagccctacatcgagcaatgatgggagagtcgataagtgcagcgcaattactaataagcgatcctataccagcagaatacctggtatatctgattttaggagggccagccgtgggtttcgttggacaagatcgatccgaaatgtcgactagagcaggagatagtcatgaactgatcagtggccgacggtgacgagatataaaattgcgcaattcgatcaatttgaggccggcgaggtcaataatcttgttaccaaggccatcgacatggctgtcggaagaccggacgagctgtcgcatattccacacaacacgctgtccctttcctgcccctcggcgcctcgaccccacaacttatgaagatatagcacccatatgaatgccgtgtgaggcgtttgtgttcgatccctcttggaagtgcacagagtccctttcgtcgtgtactcgccggctcagtccatcgagacttcccaatatattcgatactactgacgtctttccgacgaaaaagggccgggatggcaaggacaaaaatcggcgttttgtacatcgcgcggggcgcaaaaagaaactctctaccagggaatcgaaccctgccctctcccgatcgatctttagaagatgaaaggggagtatcctagccgatagacgagtaaagatgctatatcaacgatcacataattacatttataaccactcagacagcgagcgatcctttgcttcaccccaaccaccatcttccaagtcatccacagatatcgaaacagaacgcgaacagaacatcatagtacctgcaaacctccaaaagtctcattcatagcaaccgatcaacacgtatcagtcatggccttgaatcgagccgaagtccacaacatggctgctgggccgtcgcccttgcctaccaccgtcctgcagcaggctgctaagggtctactcaattacaacgggaccggcatgggagtctgcgaattgagtcaccgaggcaaagagttcaaaggcatcatcgaaaaggcagagggtatgtctgtagatcagcgtcaaagatcgtcgagtgaaggcctgttaatcaacccggacctgtaatccagccgatctgagggagttgttgcagatccccgacagccatgccgtccttttcactcagggaggcgggaccacccaattttcttcggtctttcttaacatgttggcataccatcgactgaagagcaaagacgttcctgccgaacaatacagcccacccaccgtcgactatgttgtcaccggagcctggtcgtccaaagcttcggccgaagccaagcgactggctgttccttcaactcccaacgcccaggcccttgccaatgtacacatcgctgcgacgaccaagccgaccaagttcaaccgcgtgccccgaaaggaagaatacagcttcactcaagacgccgcatatgtgtactactgcgagaacgagacgatcaacggggtacaattcgctggtgatgccgaatccccagccgccgtgccctttgatttgatccccaaggatgtccccatcgtggccgactactcttcgtccttcatctctcgacctatcccccacattgagcgtcacgcgttgatctatgccggtgctcaaaagaacctcggacccgcgggtgtggtcgtcgtgatcgtcaggaaggatcttctcgtggacaccaacgaggccgctctgcttggaggcgttcccgtctgccctatcgagctcgagtacaagatcttggccgacaacgggtcgctctacaacactcctcccgtcttttcgatctacgtctcccagctcgtcttgaggtacctcatcgaagagaagggtggcatggccggagtcaaggagaccaacgagaaaaaggccaagctgctgtactcggcattggaagaggccgaacgcaagggcctcgtcaggctgaccgtgagcgaccgagaggcgaggagctggatgaacgttacctgggtcatcgacgaggcggatggcgacgaagagtcttccagggaaaagaggtttttgaagggagccgaggctcaagggttcaggcagatcaaggggcatcgttcggtcggaggtgagtctagctaggtaacggtcacgtctgccttgtcgaatgcagctgacatcgatcgtgtgcttgtcatgcgaaaaggcattcgtgcatcgatctacaatgccgtctcgctcgaatcggtacaggagctcgtcaactatatcaagaactgggccgctgctgaaaagtggatgtagatcgactgctgtcgtcgtgcatgactctgccacttataatcatgatccagaataatgccaatgtcgcccccccccaccttagcctcccctgtccgtccaccttttatgcgttttcggggttccacgctcctactctggctggctcgttcactgaattctcgcccgagctctcgcgcgatttcgggtgtgacgcagcatcatccaggtcaagcacccagtagctagtagtagctatctataaaacatgtcgacaagtctagcacacacacccacccaccactgccctcactcggtcaacaaagttcagctcaatcgcttcagctttatacctaaaacgatatagatccccatcataacctacaaaatgtctgagaaaaggtacgccatctccagaactaaacgccgcgatctctgaatacgttctcatagtggccagcctttcttacgactcgaatatacagctttaagattgtcgtcctgcctggcgacggtatcggtaagccctgctgctgaacacaccattatctcgcatcagttcactaaaattcctattgcacgaccaggtcctgaggtcaccagcgaggccgtgcgagtgctcaagaccatctccgccaagaccgacctcgagctcaacatcgaatcgcatcactttggaggcgctggtatcgataaccacggggttcctctccccgactcgactctggatgcatgcaagagtgccgacgccgtactgctcggtgagtcgtcctgtcggacctgcattttccccacttgctaaaccctgcacaccacactccgtcgcaggcgctgtcggaggacccaagtggggtgtaggacctgtccgacctgagcagggtctcttgaagctccgaaaagagctcggactgtacgccaacatccgaccggccaactttatcagcgagggtctcttggcccactctcccctaaagcccgagatcgccaagggtaccgacatgatcgtcgtcagggagctgatcggaggtatatgtaagtctatcagggagatctgtcgcagcgtttcattacgactaggtgacagctgacacggcggcgaatcgatacagactttggtgaccgaaaagaggccggcgaggacggtgtcgcttgggatcaggccacctactcggtccccgagatcgagcgtatcacccgggtcgcttgccaaatcgccctttccgccgaacctcctctcgccgtccactcgatcgacaaggccaacgtcttggccacctcgaggttgtggcgaaagaccgtgaccgagttgatggataaggaatacccccagctcaagctggaccacgtcctcgtcgattcggccgccatgatcatgattgccaaccccaggaaactcaacggtgtcatcctgactgaaaacttgttcggagacatgtgagtcgacttttcaacgtgaccgagccagtccgactgaccctcggcaacgatcggaacgtcacagtctttcggatgagagctctgtcattcccggatcgcttggtcttttgccttcttcttcgctggccggagctcctgacccaaaagctaccgtcatgggattgtatgaaccgtgagtggggcgatggcatttcaaaccttcatgctctcgcccgatctgaatcatcgtcgaccgtctctagcattcacggttctgcccccgacattgccggtcaatcgatcgccaatcctatcggtaccatcctctcggctgccatgatgctccgttactcgctcggcaagtcggaagaagccgccctgatcgagcgtgccgttgccaaggtcttggactctaaggaccagggagggttcgactttaggaccaaggacctcgggggtgacaagggtaccaaggagatcggtgacaagattgtcgaggtcttggagggactcttggctgagcgcaagtaggcggatgcccatggcttgtgcgcaaatgaacaaaaataccaatttagtatacaattttgacatgtccaccaataccgcaatacatggggtgtcgaacgcgagatcgtccctgaccgagactctgtgaaagtcatgctagtctacatcgtgattgacgacgacgacgacgggaatggtgaggaattcgtgtgagatcgatcggcttgtgcgaattaaacgctgtcgtctcttattcggcggcggcggcggcggcgcgccagagtttatttgtgaacgcgcgtgatcgacatttcccgaagctcagagtagctggtcgctggtcgatattcattattgggaaggggggtcgatctgcacctacacactgcgaagttgtcaggtcccgacaatatcttcgacctggaccacaagttggttcatataattcataaccatcaccagctacatgactactcggcgttgacagcctctatcgcttgccccctgcgttggtctgccgaccgatctcgacctccaccttcgcacatcgtctcgacatggtaaaggtcttcaagcacactcatcgatagtgagtagtacagacattgccctggctcgatcaaacacgtcggaatcatactaaagtcattgtttctatccatggcagcgacgaccagccctcgaccgtcctcctcgccttctatctccggtatcctaatccatacgcaacccatgtcctctcgtgcgatgtcatctcccgcaaagtcgatccggtacgcggcgccatcactacacagcgtcttattctgaaaaagggaatcgtaccgagatgggcaagaacgtggcttgagaactggggaatgatgggtgggggcggtcttgaagcatgggtactggaagagagtgaggtgagctgtgattgaggagcaggggaggagtcaacgttcgatcgttgacgtcatgcaactatctgcaggtgacgatcgacccccgcacgaatcaacccgtcttgacttccatgacgagaaacatttctcacaaaaagatcatccacgtcgcggaagggaccgagtttcacccggcaggacccgcaaggtaaattcgccttagcttgcgaaagaaatgctcttcccagctcaatatcgcttcaatctgatgcaacaatagagggacgatacaaaagacgacagcgtatgtctcatcgaatttcggttcaggatccggactgtccgccctggttagagggaggatcgagcaatacggagcgggtcgattcgagaggaatgcgaaaaacgtcagtactgccatgctaaggatcatctccccattggacatcttgaggctaatgcctcataccttcgttcgcgcaggctcgtgaagggatgtcccttatcctgtctcttttgcgaaattacgaaccgttgcctcatacgtccgaggcagaacttgccgccgggccttcaacgacatcacgaccttatggatacaattacgctacaagaggaaatgtttatgattcccagaggacaggagaacgcgagtcagatgatgcagaggagcaaggctcgactgaacgaccaggatgggaccaaggcaggcggttccgttacgatcccccggcttccgaaaggttcggcatagccgctaccgcaagaggtcagaatacgtcgaactcgttaccgagcgcgtccttcttgtcgaacaagaatctggcggtgtcgaatgcactttctccctcagacgaatcggacggccgaccacgaacgacaccatcgacatcaaaactaccatcgacttcacccacaacgtctttagcagcaacaacgaacgactcgggcttggctaatttacttatttcaaatatgtcgccggctcctgcctccttctttctgtcgcagcgcaatcctgccttgtatcccgggttgcgggagaagctccaagcaaagaaggaaagagcgcggaaagaagcgcaagagctcgggctgtcgcctacagatcagcacccagcaacatgagaaagaattccctcatttggcgttttcatcgccggttgtaaatacctagtccagtacacagtaacctctacctcaccggcctcggcagcatctaaggatcatatgaaacatcatctatatgcagtatgaacaagccgatccttttcttctacctcctctgcctttgacgctcgttctccgcctgctcagctattctcagcagcgtattctcttcgcccgagcgcttgcagagctctcggaaagccgagtcctcccgtttcatcagcttcagagggctatcgtattcgaggacttggccgtgatccaacaccagaattttgtcacagtccgcaaccgatctcaacctgtgtgcgatggtgatgactgtcacgccgtccaggctgtcccgcaagactcgctgaatagcctcatccgtagcgtgatctaaattttggaagaatggcgctgagaatacacgccttcatctcgctggcaagcctgttttgctgttacttacccaagttggcagtactctcgtccagaatcagaatcgaagaatgtcgtagtttcaacagaccgcgcgccagactgagcaattgtcgctgtccggcagagtaattcgcccctcccttggcgacccgctcgtcgagactgttaatcatcaccttctcttcaatggcagtagaactgccatcatctccatgctcgtacacggacgccgcacgactcgcggcacgactggcaaggcgactgggtcctggagtgttcctggaagcgaggccgcacctccgcaaggcatcccaaatgacctcgtcgtcatgatcgttgaaggggtcaaggttttctgaaaaaagatgactatcagctgctggacttctgaccaggaccgaatttcatgtccacttaccacgaacagactaagccggtcgcaacacggttatagtagccgatagagatgagtgtccgctccacacacaatgcccaaaggagccgaacttacgcctgaaaatagctgagcctcctggggcaaaatcgtcagacgctctctgagcgatgtaagggtgatggtagagatatcgattccgtcgatcctgatgcttccagaactcgcttcaatgaagcggaacagagatagggccaacgctatgagacagttgttggtcagctccctctggtctaagtcggcacaagcttctggacctactggactttccgctccctgccatcacagtaagacaagccttgtaagcggattctcacctgaaccaaatcaactttgcatcctcaccggtccttccgcatactcctacacgttccccaggctgtacaacgaaagagacgcctttgagaacggcaggaaggccaggcgcatatgcgcaagtcaagtcctcgacctcgatcttggcttccttagtaggccaatacgcaggcggttccttggcctcaggcatggcttctggctcaagtttgagatctgccggccaaatgtgcgaaccattagtatgttgaacgttatagccgcgccggtatgcctaagcggaacaatcaggctcacattcttgcaaacgctcgaccgatgtcatgttctgctcattggcagcccagagacgaacgatccatagaacaaagtccgtaaaggtcattgcataagacaacgacaatccagcggcccctaaaagcgcaattccccatcgtcagctcttcaacgcgattgcgacgactcattgtgcttaccggcggaaagtttgtcattcaaaagaacgaagatggctgcaaaaataatgaccagggagccggctacatcgcaatacaccgatagcaaacggttgttctgccagagcaggtggaaagcccgactgtaagattgccgctgttagacactggcgaaaacaagtcgaagccagcgagcttacatattggtttctagcctggtcatgagctctcttgtaaatctggcagtgtctgcatacgctcgaatcgaagtctggccctgcaagacttcgccgaagccaacaagtacaggcgactttgtgacagagtcacaacgtttcacttcgagactggtagcgttgtacaacgcgccaataatggcgtacaagcctgagatgaagatggcggcgaggatgaaagctgtagcaatggtgcaatcgcgaacgtcagttgattccgataaagcgcttcgtcagaaggtacgtaccaggagtagcgaaagatacaactacgaagacggcgacggtattgagaacagagttcacgaacagcatcatgacttcagcggcttgttggtcaacgacctggatatcgtttgaaagacgattcaagatttgccctctgtctcagtcataaggagaccagagttagtcaaaaaaagagcataaagtcagtgttgtctgaacccacgaaggcgtgctgtcgaagaatctgcgagcaaaaagtaggtgagtaagctgagtaaaatcaagaatgcggaacgagactcaccgcattctggctcccagaacagccctcaataactgaccgtacagtacgcgactggctttaagtgacgcattgaaagttgccaaagtacgaccggctaccagcacaccgaagagcacgttcaagacgacgtatatcatgagataatagagcgaatcgtcttcgggtgaattgatcttgtaacgatctccaagcgccctcactagctcgatgctttcttgaagagcagatgcgtaggccccttcgacagcattggcccagctccgaatccagttgttggtttgaatctgcgttccttgagcaccgatgaacaggagcactaggaatatccagtacaccagagagcccatgtatttgaagtaagcagtataggtggctaggccgatcgatccggtcgcttgattctctgctttgaagaatttttctcgtttagcggccggatccgtcttgtccttgtcaagctgtttggcaacctcttcgatctccccttcatgtccttcgagatcctcaaacgtcatggttccgtcttcgatgtgcggcaggtctttcgggtctccgctggcgcccaagtgcttggtcaagtccttgccgtcgtcttcgagctcttcatcagcaaagtggccttgggctttcagagttccaggtgagccgatgcctcgcacctcgccggcatcgagaatgacggcatattctgttccaggcagtaccaatccgactgcatgggtgacgagaatcaaggttcggtttgccattaaaggccccttgaaacagttcttgtagagatgactagcagtatgggcgtcaaccgctgatgtcacatcatcacacaatagagttcgcgccgagctgtaaacggctcgcgccaaagcaatacgagctctatcggaacaggccgcccatgttagtgcgcttccttcatgtcttcacaaagctgtttccagcggtcgtgactcacttctgccctccactgcagaccgttcccttttcgcccacaatggtcttgtctccgtcctcgaaaatttccaaatccctttctaatgcgcaagccgcaatgacgctatcgtacctcgtctgatcgtacgcccgaccgaaaaggatgttttctcggatcgtcgctccgattaaccagggtgcttgaggacagtatgcaactgtgtctgtcaagcccgtgacgggatcttcaggacagagttctcggtcaccacgatcgttgatcataaagatctctccgctcaataaggtagtctctcccaagagactgttgagaagggtcgatttgcccgatccgacagatccaacaatgatggatagctcgcccacagggaagcgaacgtcgttcagttccagcctgaagttctcgctagtactcgactcggcagcctcagctgattcactttcttgggtctcgcgtgtagcgtgcttgatgacagcattcctgaagccgataacggggtcttccggtgtctttgcaaccgaaagctggtcgtattttaaagtttcctcaacattcaagaattcttcgactcgcccagccgagacataggcgttggtagtggcggtcgtcatctccagaacggcggccaaaggcgtccttatcattgaaaagagcgacagactggtaaaggcgatggcggccgtcaaaggtctcttgaagtagagagtgtagaaggcgaaagtgacaatggtgaccaaaggaggggtaatttgcatcatgacgttggcaagcactcggatcaagaatcggtgtttcagtacgccgagttcgtggtctcgcgatttttgcattcggtcaaagaacttgttttcccaagctgcaaacttgatcgtcttgatcgatgacaagacctcggtcgccgcttccagacgggcatcagtcgcatgcaagagctgttagtaatgcaggatgtcagcgttcatgccgcacctattggaacacgcgggagggacatactgtcttctgtgtgctcgcaaaagccttggtgatgaagccttggatgggggtaagcaagatcatcatcgccactcctgccaaggacgagaggcctattgtgtgtacgcaaaacggaatgagtctgatgctcccctgatagccgtcagaacatggactgaccaagcagacggtaaagaagggccatagcaacgatgatgcagagaatgcaggtcacaaagtagtacaggtaacccgcaatttcggctgcaagtagagctcaaagtcaatttcggagttacttcgaggagattccccagtctgtcgtgcttacagatgaagaaggcatcgacaccaacgaggttagtgatattggcttcgaccgcctcagtctttggcttgctggagtcttccgtgccattcttgtcctccgttgaagtagatgcgcgggcagcaacggcccctgaaaggtctcgccttcgaagcgctttgcaatagatttccgtgatgatgacggctcgcgaacgaatacaaatctgtgatcagggtagatttcatcagttcagggcgaaaaactaccatcccgctgataccgactcgacgaccagtgtttagaatttgagattgcgaaagcgagctcccgagctggtcacgcaggtttgaacgcaagcacttagccgctgctgaagtgaatttgacacggaaaggatcggctcacctgcccaatgaccatcaaagcgacatagaggacggcgacatgggtgggagttttccctgctacatttgggtcgttcgatttccgatcggctacgaagcgaagcagtaactgcaagctgagaggcgagaaaaaggcaaagatgacggcccagagcgaccagaactggaacatggttcaatttgattattcagtgtatggtcaagaattggctgtcgtgtgggaacgctcacaaattgcaaccaaaacagctcccggaagtgccagaacagcctaaaagcgaatttggtttgctttctcttgatgggagcgtcgttctgcgcttcggacgcttcgcttgcttgttcctgatccaatctccaattggcgacactgacgggcggggtatcgtcctcccggatggctggtacgtccttgacctgcagcgggtttttgtagtgtctcagaacgatcgggatgacatgagagaacaatgcacgagacatgacggatcgaggttcggcaggattatcgttgacggtgtaggcttcggtctcctccgctgcatagccgacgaccaccttgcgccgggcaccgttccctttaccagccttgagatcttgcaggatgccgtccagtcgcgttcggaatgggacgctcgagtatgcgacgaggaagaagatggtatgtgccataaggatagtctcgaaaacgaagaccttggacacagcatgtcgacccgaatcgcggtgatggtgaccgtgacggtgaacttgagggccttccggcttgttgcccaggtattccaagagagctgagcggaatagaatgaactgaaccgggaggaatagccagagaagagaggcaacgtggacttgggggatgtatttgacgaaaggagcggtcttgacagtaggaatggccgtacaagccaacaaggtcgtgtagatctatcgcatgattgcatcagcaccccttgttccgacggagctgtcgtgccgtcgagaccaaactcacaaataaagccaacctctcccaacccttttcagcagtcgtcgctatgtaaacagcttgcacggcaacgaagccgagcgaaccgatcaacccgatccaatcgcccaatctttctacggcagtcttttcgcgttggtccagtgtgcccgtttgtaccgacgcttcgatcgaggattgaacagattcgagaaggatgtgatcctcaatccgacggagcgagggcttctcttcgtcctgagagctagccaggttggccccttcagtcaaggatatattcttgccggacacggctatgcgtcgagcgatggtgggtagaagcacgatcaatgacgatgtgagcacgataaggggaaaaactcctggaagtatgctatcggatcgaacagtcagattcaatgagcctgaattagcatgatcaaatcgtccacgttcagtcgtgctgatctcctacctcttcttccagcaatgggaaaaatcgaccccgtcccagacaggtcctacgtcatgcgaacaaaagtagtccctcatcttgagcggctctccgatgtccggaacggcaatctaagcggcctgatgagatgtgtcgtaacgacaactacaagttgtgtccttgcaatttgaagggtcaatgagcttgaatgtcgaagcgacgtcgacgatcgaaacctcttttgaactgtaagtctgcgggtctttgcgtagtagtatagtagttgcctagtcaggatcggcggaaaatgacgaaagccttcgcgttaggccgagcggtggaaacgaaagggataaaagacactcggggacctgcaggctattcagatcaagatgaaccaaagtgcgattcgatagacgagacgagtgctcatcgtctcgcttctactctactcgagatcacacgtcatggattctggcctgactggcgagagccacgatagtgagtgcagtagggtcttctccatttcgggctcatgagccgagattttggttcacgtgtatacgtatcgatacgtgtggcgtgtgggccatcccagatctcaaaagcttcaaagatcaccggcccgaatttaggtaataggcgtgcgttttgcttggcaatctacagctatcgcatccacctactgaacggtactatggagtgagtgagcgtctgcgttacacacctgagtgctcaatgtcctggccggtcttgacctgtccgcgctcaatcactcacttttgtgtaacctacgaatctcaacctagctagctaattagctaacctcgccccgggcccgcgcgctagatcgaaatcgcgcaatcgcgagatgcgagatgcccgacccccctctccctgacatcgaacctcgccgaacgtccttcgtcatctccatgccctctcttttgactctgtagagcaacaatcactaagaagggctcgcttcctgtccgcaccaacacgaactcgagacgttccagacaattagtagtcgtaagagtttcaaacgatcacagacaaagatctacacttccatgttatagcacgagatatagacggggcatcaagtttcttccgaaatgcgcatatcaccatccctaagagcgcttgccgacgtatctgtgatcatcctgctatgccctttgatcgtcaaggcctcgacgattctctcggggtctacctctcaggtgaacctagaagctggatccgtcacgctcaactacccacaagagcgacataccttttcgaccaccatcatcgatctgctgagcacgagctctcatcatgatatcctccttcatctgcttcaaagatgcaagctcgtcccctcggtcaatcttatgcaagggttgactctattcgcaccgaccgacgacgcttgggaatcctgggcgaaagagaaggaacacgggcctgtagaagcggacgcgagactcgctgagatcatcttacgacaacagacggagaacgtggacgctcttctcgcggataacatcctgttcgacactcgtcagctcttactctttcacatgctcaactacaccatacctctcgaacatgccaaccagcttgatgggctaaaccgtcacccaaccgatcggtggctggctcggaacgtttcgactgagactaccttgctgtatccttcgcgtcaccatcatcctgccggtcacctcccgccccctcatccgccttggtctcctgaagggggaactgggatacttggaggacatgggcagcagatgcgtctgttctttcgtaaagaccaaagggcaggcccaagtcgggtacagattgatttagatgggcaaggtggcgctgcagtatggaccggatgggcaggcaaccgcacggccgacagtcatcgaccagcacggggcgacaagtatagggttggtagcaacggcgtattgatcgggatcgatcgagtcctctctccgcctgatgggctcggtatgttgaatacttgaatcttcaatcgccggaggattgctagctgaaccaccgcgggtattggaacccctctcagaacgtcaaatgcaggccgaccctgagctgtccgatttcgcatcgcttgtctcaatgacaagcctaccccttcttacgcgatcgaacaaatcgcatgcggtctcctggaacattagccgggcagcacatagcactgtcttcgccccgagcaacgcggctttcgacaacaccttcgacgaactggaaagacggtatctattcagcgagtgggggagcgaagcgaggagaaggatccttgaaaatcatattatcttggacgcttcagctcgtgtgcgcgatggtgtcaagcgggagcgcctccctcgagttgggtggaggggctccttcatcggcaggaaaccgcaggagggtcagtgtcggtatctagccttgcgaaacttctcgttacgcgtggttgctgactggccatgcaattcacagtgctcactgcaggcaatcgctccgtcgttgtacgaatcgatgatcgaggcagcatgatggtcaacgacaccttgattacgaaacccgataattttgccgcaaacggtgttttacatcggacggagtctttcatcttgccacccgacttcaagcttttgaattcgccggaaaaagtcatgctctcgcttaacgccagtcgattcgtcagtttgctaaggcaagccggcctagcaggcaattacaccgatacgacaggcaaaggagacaaaaggacatttctcgtgcctgcggacgatgttctggacgctacctcagattgggagtggacaagtggagcctttggggaaggagtgaggttaaaggaaacgcttcaataccacattcttccggggcgtatcactcctaagcatctccgtgatggccaacttctgccaaccgagttacagcttgggaaattgggaggcgacaggcagcgtctgcgcgtgcacgtggactcggggaagcatcaaggaggggtcgacgagcagggcacgccgactgacattcgcttcggaatggcatcagtcactgctgaaccctgtaagacatggtgtttctcctgccaacccgactcatcgactaaaaacgaatctttgtagactatgccgatgactacgtcatctacctggtttcgacactcaacgaccctcccgaagatgtcatccaaaccgcggtatccaatctcgatctttctacgtttgtggcgtccctatttgcggctgggctagataagctcgttcgcagaacggttgcggtgacatatttcgcgcccaccaaccaagcctttagaaacttgggcctgatcagtcgttatctccttggcaccgacggaaaggacgatttgagaaaggtccttaaatatcaagctgtggaaggccttctttatgaagaagatatgcacgatggtaccgctgcgctgaagacccttgtcggagaggatctcttgctgaacaggacccgcatggatgtcaattgcagccagagcgcaattagcgggccgacgagaaacatctctgggttagacatccttctcaacggaatgcgcccgagtaagatcgtaaacaccgatcttctcacatcgaccgggcctattcatgtcatcgacggaatacagatccccccgagactgaatatcacccacggcaagctacttcagggggctggctgctcgacactaattgacctacttgtcaagagcaagatggaatggctgctagccggccgggatcctcccattgagcctgagagtcgaaccaagcaagacagtggaggacttaggcggccgttcacgattttagctccttcggacgaagcattttcacgcatcaaccttacgttttacctgaacaatgatgccgctctcctttccttgctgagtctgcacattgtcaccgctggccaggccaacgattatggaattgccaccgagactttcaagaccagatcgtcttatcctctcttactacgggatgaaagtatattttcaacattgcattcggcgcagcggttcggcgatgtcatctttcggaacgacggccacggctcttggttggttggaataaatggcgctaggggagtagaccaacagagcaatgctgcccgggttatagaagctggaagagcttcaccggcctggctatcaacagaggatccccaactttcccttgccatggacgatactggaagcgtctggagcgatggccagagcctcggtggtggcgtcatcacgatcgacagagtgttgctgccgtatagacccggctggtttgccgactggggctatttggcttgcatccttgcgctgggagtattgattcttttggtggcggcgggatgcgctggggtgcgatggaggcgcacgagcggaaggatcaggttggagggcgaggatgaagcggactttcgtgagaggggttctgaccgggaggtcctcgcggaacgggattgatcgattgagctcgcagtcggtcatgttcatctgtagctttgtagcatatgttttttgcgaccctaaaattgtatataagtctgagcatagagacttggttcactccaaatgtaacacatattgatttggtagaagagacccacacgcttgggagatcaattccgagtgctacgctaccgctgtcgggtgaagccgatgaggcagcgagcgagcatttggagtaacacaaccacgaacgggagatgacatgaaggcctaaatgtcctttatgaattacgaagcgacatcagcaagtagtgatgatcacttgtacgatattattatgttgatcatgatctcaagagcagaggtacactcatacaaggggatctagaccatcagaaatcagactcgctgaaaggcctcggattttccctcaagtgaatggtgccacgaccaaagcgaacgtttcagcattcggtctccttgaagtcatctatcaacttcgttcatccatctatccactgccagcagaatccgtagaattctggacggcctacaccgttttctgatcctacgcaggcaaccgggaccgacatgtctatcaatcggacgactgggaatgcccagcctcgacaggtgatcctctggcgttcgcgaagcaacggcactgtgaaagtcagttcttcagggcaccttgcagcggactatactgccgaatcgctagatactagcgataacgcagagatagatacctttaggaacccacctataggcggattgatccttggaagatctttgccgctggaggccgacccgcttttaacagaggctacgccagtcctggagacatgcccttactgctttcagatccttcctcaggaagattcggtgcctgctggtaatcgaaaccggtcttccgcacggacgtggactactgaggacatacaacaacaaatggactccactgatcgcggcatgcgagactgggacgagtcgagaatgcttgctatcgatcccttgagaagacgaaagcccacacagatgctgttgactcgcccatactttcgaatgctcgagcagtccatcaccgatgccgcacatgagggatcagccggtgtagctagcgtcgacagcacccagcaaccgtcccggcgtagttccatcgatatacaggatccgggtcctgacgttgacgatgaagcgtcccttgacaccgggatggaggggtactataagaggtgtgctaggctcaaacgtgaaactggaaagtgcggaactgttaaaactgtcgctcatttagattcttcgtggaggaaaagcgactgggtatgggtgcacaaggaaccgtttacctatgtcgacatgtcgtcaacgggaatttcctctcctatcacgctgtaaagaagattgctgttggtaattcgaaggagtatcttgcggacatgctgagggaagtccggctcttggaaggccttcggcacaagaatattataccatacgagacgatctgggtggagcccgctcgcttttcgaggcaagtgttttgggccagggtatgtgaagttgcactcactacaacaaaattgcctcagattggcgcctcctatcgaagcccttcagtaagacgttacacttcgccgcatcaagatacatttgctgttgctgacgcaaagcttttgtctgtgatagcatactcatgatgtacgcgaatctcggaaatatcgacacatacataaccgcacggtattcagtaccgggagatgatcaggttttcgacacgtctggtgcattggatggagaggccgagccactttctgttgaggagagaaaaaaactcttcaagcgccgtcgcctcagctctaaagcggctgatattgcgcctgctcgacgacaagatgtccgtggtatcttgctgtttagccgagaggaggtgcaaagtttgtttggcgacatacttgagggattggaatttctggtgagcatgctaccttatatcgcacgatcacatattcgcccaatcgttgacgaaagcgggcttgatagcattccaaaggtatcgttcatctcgacctcaaatgccaaaatgttttgctccatctatttgacggcgaactcatgtgagagggcgatattgtgcttattttagtctatcaaatcgccctcgacctgaccaaaaaaacattgcagcccgacatgtatgatttcggactttggaagttcaagagccgtatatcagtacagcgatcacacaagaacgggtcagactgggacgatggagtcagtcttgctacgctattgaatcgctgaatgttactaacgcgatgctgtccaagccccaaaggtacttggtgaggcgcaactgggtgacagatgtaatcagcagctacttataaacgtcatacaggcgccggaaaccatcactcctgacccacaaggaaagttcctcgagatgaactcgaagctagacatttggggattaggtaagtttagcttggtcccctgggagggttctcgagctgatttcagctttgtaacccaggattgatcctccacaaaatattgttcttcaacctcccttatggggaaacgtctacttacgatgagctcagcgaaaagatcaagcgatatccggggtccgtttagtaatgcaagagcagagtcagactcgtacgctaactagccgtgtcaagtccagcttcaagacgactccagagatacgaaaagcgtgtcagaggcgaggtatccctctcgagatgttagatgtcctcgaaagcttgctacacgtggatcctgttcggcggccaaacgtgtcgaagacgttgtcaatgtggcgatcgatccaggtgaggaggggatcttgcaacgattctatctgtgctaaatgccgtcacggcgccacagtaccaaaggagcgaggccacgatgcccctcacagtggatgtaatcaggactcttcccacatttagtgaacatggacaccttggtccgcatgaacacagtgcagatcctgttcgagataccatcgtgcccggatcgccgatctgggagaaaagtttgaagtacatagtctcggcgatgaaggtaagccgcacacatactgtcatggtcccatctcacgtgctgatgagaccatgacggtcgacgctccacccagatcgttaccgctgttccgcctatcctgaatcgacccatcgcacccactaggttttatataatcgttttgttggccttgttagacctcgcacaaaccagtgctcaaagctctgtggtactcggaggtctacatcttgtactggtctggtggaggtagggaatgtaagctgtttcaattgcaaaggtattcaaaagtcaatcttctcaggctactcaacccaatcccaagtccgggttcgcagtcctacgaaggcgtcaagaggctagagggcgagatcggaacctgattcggccgattgcgatttacccccggtcacttgcggggggtcatgtgatgaagcaggcaagcgaagacaccggcgttgtcgcgaaggtcagctcagggtgcaggttgcaggttgcaggttgagccatattagcatctcgttgcgcgttcgacacgttgttcagcttcacaggtcgtctattagagtgcaccgacaataaataggaatatcatcctgctggctagaattaacaaggcgggatacaggcagacacatctccaactagacttgctcaaatcgatgaccatgtcgacccgacgcaaaaaccctcagtcgtgaatgtgatcagaggttgcggtctgcattgaaatcattgcttgtccgccgtcaatcgatcgttcggcggataggatcggtctacagcaaggtcgcgttgctccgacatacccagaatcatcgaagacgctaacaaatcgagatggctcccttcgatgatcggtcgaaccccttcgaacgccttccatgcgagattattcagagcatcatctcgaacctatacgatcccatgcgtatgacccaggccgaccgcttcgcatggaatatcttctcctcgttcggagacaacccaccgtcaagaaggcaaagcctcgcggatttggttgcttttggctcgacaaacaaagcaatctggtcggaggtgcgcccgcatcttttccgatgtattagggttgcggacgacgaacacctggaagctgtggtcgcctcgaaggatgattggggcaagcatgtcaggtcaatggtcatcgatatgtcattgttcgaaagcgacgaaaggcagttgtgggaccggggtcgcaacccttggtatgtatggcttggcttcattataagtccctataggctgacatgctttcatctttcctaggcatgaagtacaggcattgcatcaacttgctgcagcgcttcctggtttggagcatctgtcattttttgcggatggttccgatgatatcacgctctccctttttttcggagcacaaaacgtacgacagtacatcgccccacgacttaagtcatttggttggcgagcgcgttcagagactcctcaggaagctcgaacatttgcagcaactagcatgttcatcagctttgcagagtttttaaaggattgcaaccaactcgggtgcattgtcctggactgcaacgcggaagccatggctatgtctgctcaggacctggagctcgtgctatcttccctccagcgcaggcaactggaaatacaagggaacgcgacacagaatcatagcccgcaacaggggtacccagcgctgacactcatgctttgtggtctgatgtctcgctggcgtccaggcgatgcagatttggatgccgcagagtctcacccagcatatattaaggcacgaccgcgttcgccccgctcggtcccgtgggatgttggtgtcgatgtccaacccagtccagaattccatgctgaggccaacaggtcagagacgacgcaacatggcgaaaccgacacacaatgggtcactgtcctatctcagggctgcgtcaactctcgagcacgtgttctaagtaccagtcagccatataaagtaaagctggcagtggtgccgtactcggatagagttcaattcgacccgacgtgggaagcccgcttgactttgcatcgcaaagccgggattacaaatcatcaatccactcagcgcggcttccttggcagcatggccgacaagatggggcatgtcagggagatttttctggatcgaccatcaatagaagacgataaggatgtgacattggcagaacagctggtaagacttggttaccttttcctgggacgataacaggctgaggctcgcgcatggtagatgtcggcacttttacctctggcgaatctccctcatctgcgtatcctgcaagtgggaggctaccctctaactcgagaggagcacaatcgcttgattgaggttatcatacagctctgtccggagatcatggtttgcggttggtggtccaaagacgaagacgtagtctggtatgcgatatggagggacaggcaccaagaaaggcttatcgacacgtatctcagtcgtgccatatgctcccacgcacgaatggattcgtctcaggtgcctgcggtagaggattcagggaaacagctcgccatgccgagatacctcatcaaaccgctcggcgaaggggaattgtttgctcttgaagcagaacaagcggtgtgtttcggcatcggatatattgtgttcgaaagcagtttactgatcgccctgagtgtcatttcttcttgggccctttgatataggcatacgaacggcagatcgctgtccatagcagagtgctcgcgcgcacgaccttgtcaccagagtcgcgcatcacgggctgatatccgcggtgccatttcgattagtagtgacgtcaccgagttcgcttctgaatcgcccttgtatccgtgacggtgatgccactcgcacatatatatatagcgtagcgagatcgtcctccgccattcggatgcatggcagcccgagtttacttgagtcaccttcacgatcacgatccaccctaacatcttcacatagccaaacttactatcagatcagcgcaaacatgtccgggtaagctcgcgtgaaggatttgcaattgcgttgcagaatctaacgtgtcacctgctcgatcgcttgtcgaccatcccattcagagccgccgatgcctcgaccgagaagatgatgaacatccccaaagcctccgacgaccaggaagcgaaggctcagaaggagcagcgagaccctgtcgagacgtaggttgccgtgcaccttgatagtcgtgtgaccaaatgttgacacgattcatcaaatgactgttacctcaacatcagtcacggggagaagcctgccggtaagctagtcgaggacagcacatgcacagctcgtctcgaaagctgacatcgtaccaaatggtcagacggcaagcctcacgctactgaaactcccacctacagcgacgacaaggctgaccacgtcgtgaactgagcgtaactcgcatagtctaaagtgcagcaggaaacagatatgttgtatgccatgagtcgatgaaatcagaactggaatctaacaaaaactatcattgtcggcgttcacgcccggcgccgtaagactatcatcggttcaagtgcaagtgtggcttttcatgagactgtggggtatcttgtgggtggatcgattagtaatgtaatgcatcttgtacagttcacctagcagcctgcagtttctgaacgagagcctggaaaagtgcgaatagcatgcctgtactcagttccagctgtacttgccgatatcaaagggcttacctgcagcctggattcaagatcttggcccggcctgcccaaatcactttccttcgaagcaccgcgctcctgatcactgtcttcaggcatgttttgaggcagaattctaaaatgaccatccgcgttttgcgttgagaggtcagccaggagttcttgaaggttgcttgacgacgagtagaagaccttttgcaaattcaatcaaatcgttagcaccggtcataaacagccgagatgatggtttataatcaccttagttttcggtctctctacaggcgactcgagtaattcgcgctccgccactgaccaggccgcatcatcctcgtccagatcaaagttattcgaattcatgctcggtttccgaaacgacgaagtgctcgagtcgcccaagaggctctcctcgtattggctagctattcgttgagattggcgcgacaccagagtgtctttcagagtatcgcccgtcccgtcaaccaatccccaggtcacttcgccgtcactcatttctcgaatctcgagcatctgcgaggaatgaggttggcctgtgtaatcgtccggcgacagagtctgagccaaaggggggtgttgctcttcatctccgccatatagctcgaacagactatcgcgcgcagattcccgcgatggccgagaacgctggctaggagccctttgcaacgacggggtccctaataattcttgctccaatgccacatctttgctcgtacggtgtaccggcttccgtttcacagacggccgcctgtccatcggtgtcgaagtcgaatgaaccgcactagaagaggcgccagaagtcgtccccaatgctggcaagacgttggtcggcacgatgagtgtccggcggacgacagagcgccgggctcttctagtgtccattgggggctctttaggcgttcgagggtgtatctcgctcgctacggctggctctcttctccttggaatcggtgccataggaccatttgcaacgcgtttctgcgatggctttcgcttgatcttagccaggaggcctttgaatcccgatggcgtcgattcactagccttgggagatgccggagctggctccatattagctaagctggaaacagaggctgacttcccgtgcccagcgcgtcgcatatcgcgcacaagcaagtttccagatggagtgaaccctccctgtgccatttggggagacgtcaaaggagacacctgaagtgtagctgatgtctgcagaagggtcggagacccaattttgatggctttgttccgcgtattctttcgtgaaagccggaccgaaggtgtcttttgcaaagcggctgtagcttgggcgatccgtgcctcaaagtcccggcgtacatccggatcctcatctattcgatatgagcgtgcactactggtggactccatccggcggtgcgaataacttggcccaacaggagaaggcggctccccaaagctttcgttcggaccaaataatgcttgagcgagacgagacttagcaccgtcgcgatcgcttacctctgccgacatgacagaggtctccacgacgtcgggtaaagtaggtccactaaagtgcaaatttgaggacagccgctcaacatgtcgacttttgtctactttcgacgaggtgactgaaactggctcgttcacgccacaacgggattccgtgtcaaggtgatctggggccttatcgacagccgttagattcgttggcaaatgtcccgggtattctgggcctggacgagagggtgaggacatgtccgatggagctgtcaaattcggttgcggggtcacgggcaacgccggtgccagatctttcaagcctgctgcaacgtcgcctgggaccttctgaaaacctgtctgtttacttcgggcgacctcattgagcctgtcttgcacatgccgcagatcgtcgcgcgaaaattcaatgccggatgtccgatggtgttgcaggtcggcaaaatgggactctcgactgtggaagttgttcgcagatggaggaccgaagaggggttcagaaggagagggctgatagtcgcttgaataaattgacccgccagggcttgcagctcgacctaacgcgtcatatgcagcgggcgactgacgcgttgccgcaatagggtcatggtcctcataacgatcagagtcatccccataataacctgtcacgtcgaaggtgtagtcttgaggactaggtagaggatcatgtcccgagatagtcaacgactgttggggaagggtcgtcgtctctgtcaggctctcaggaacataactaccggtggcttcggtgaccatggttgattgtgatacggctgaaagaggtatatcttcgttcttgacgcgctgatgttttgttatcttggctccaggggaatccgcttctgtaggtaatcccatgtcctgctcggggttcgaccttgctgcactctcttcgttgggagggtacccaatgggcttcccaagagccaatggcgggggccgatgaacatttgtgtcctctttcaatatgaagagatctgtaccttcgtcaacagtcaaagcatcacttcgggcggattgcccgttccaggttagcgattctggaaagcgacttgtttctgctgcgatgacgccttgccctgtaacagcatccgccaagcgatcgtgaaaagctggcgatctgctaatcgaagcgttgcgtctatcattcccgaccttctttgtcggagtccgagcaggtgattgtttcgcggcctgggcgagggtgtgagccgattggaaagttggcgttcgtgacgattgggcggagcttaacaggtcagcctcaacgagtagtatcgccctagaaatacgctgttgagctgctggagacatcgcctctacgactgatctccgtttgtaagaggtttgacttgcggcattgtcgataccgccagcttgtgtttgggttcggagcagctgatcacgcgagccggcatctggcagaccaggatggtagtccccgctggaggggcttgccgatatgggttcgcgattaagtaagggttgttggtaccgatatcggtccttcgcattccgcatgacttcagcctctcgcatggcctctgaggaaccgaatccataagcacgactagaagagcgctgtgtcgtagaatcagacctcgggcaccggagagaatcgtcgctttctgggagagaagagaaacctgatcctatttctgggcgagattcctgctgtcttctgatgttttcctcaagatcggcaagtagcgccgcctcttcttcttctgtcatgtagtcgtcgacggcactagctgatcgttgatgcgcgaaacgtttcctcatgtcctccaaagtaaagacgccggcaggcaatgggggtacgaagctctggttgaaactttgctccggcaatctgagcactgagaaccgatttgacaggctttgaaatcgaaggaacgttcgtgtcagcactcgaagagttcgtaaagaccatccgaagccgcggctgaccctgcgatgatcgtagagccacggaagtcacctctcgctatcgctacatcgctcagcttcagaggtacctggtcgatgctggttgaagcatcgatcacaggaggggaaatatcaggtctccgcgtctctgcagccgaaggtcttcgcttcttgagtctgtgcatgatgatctagcctcagccagaagcaggccgagacgtcgatcttgtgtcgagataaactgagattgtcggtcctcctccctacttcaaaacccgactttggaatttgagagatcagcgaggtggtaatgagatatgacatacataccggggatagtcgagaggtggggtcgataagaagctaagaaaccgacatgggcattcacgcctgattccctgagccgctgctctgtcgcgctctcgttccccgactttcgctcgtctccggaccaaatttctgactccaaaaccgatcgacccccccaaagatagctcaacctcaagagcctatgtgttcagtcacgtcgccgaccatttcatcctcctgtgtgatcgtcgatcaacaccatctgagagttcagcttagctagccgcagaattatcagctcaaacgtaccatcagttcttcctaggcttcagtggtcgtacatcatcgcgtcaggctcaagcggcaaactcgacgttcctctgcctcttccgttaccaaaccccttgaaatactatcgctactactggtagtaaatccagcatcctccctcgaaaaccgaattggcagtcgtaaacatggcccaccacacttttgaggaactagccgagaggcaagtcacctgcttagcgatgtggggttactgaacaatgtatggaagctgactgaaatcatgtcaacttgtctcaacaggatcgtatactccgataaatgtcagtgctaggactgagctaaaaagaaaacaggtctgacaatcctcgtgaatatctcgtcttacagatgccgacaacgcttttgaatataggcatgtcattctgcccaagcaaatgctgaagatgctaccaaagcagcaagcattcaatcttctcacgtccagtgcgcagtccacagtacttatcatcgtatcttcatacgcagatatttccaagacaacgattccgggctcctacgcatactgtctgaagccgagtggagggggattggcattacgcaaagtctaggctgggaggtgagcaacgttctgtctatccggattcacgtatagcgaatctaacctgagtcttgttctgctatcaaatagcatttcgaagtgcacggtacgcgaatcggaagatgacgcctgccttcggacagcatgctgattttcccctgcgatgtccctgtagcacccgaacctcacatctgtcagtacatctttattctccttcaaccaggctgactgacgtcgtcattgcacgctccgactctagtacttttccgtcgcgaaatcgattaccaggtcaaatatccacagggcaaaccggctgatttggccgccctgaacagagccaaggcagaggcaactgctcgaggcaatggacgagcgtagcaccagctgaatagctaaagcgccgtcttacctagaagcgataccggcagctcatttcgatttctcctctgttaagcgactgaatttctgcatcactcagatcccacttgatcattattatacgtgatgcaccatagttgtaaagataggcacagacagtattaaacatacaaagcgaaagccaatgatgcttggagtgcctgctacaagacttgaggctacactgcagctacttgagcctctaatttagctctcacacgcatataatttctccaatattcggtggttttgcgaacacccttcccgccaagccccagcgcatcctcgtctatggctatctggttgacgccatcagcctcacctccactcgcgatggttgaccatcccattgcccgttcgtgacagtcgagtgccatctcgtgtagtgcttggcgctctgccgcatcatgcgccgacgaccgagcgaactgttcatacagcagtccagtcagattccatccttccgctgccgtcctctccgcgtctcggagcagttgcgatgctgggcgagcaagcggactcttacggaatcccttgccaaatctctctgcaatttccatattccgcatggggatggcatgagagggtgcatatcggttctcagccgccggcctggctttgtgcgtcgtcgtataggctgccgcaatgttgcgaatgacctcttccgcctgtttggttgcgtctgccaagcgcgaaaggccaacctgcagatcctctccttgggcatgcgcaacctcgacggcgttcaacgtcaagacggaggaacggtggttcaaccatagattttgcagcgaagcggcaggggaactctccttgacagatgcgaccgcattggctagatgcagcgctagttgttggaaagcgcctgcttcctccagtacaccttgcatagccaagtgtgaggcgtacgagctgatcaaggagatgactgcgcggcgcactggcggagcaagatttgcccctgaatccgctatcgcgagatttacaggggccacaatgtgactattctgggccatagcatgctccgtcaacgggcttgcatggtccaccgaagagcccgagctgcgccaacgtgagagccaaccacgagcctccgccacttgtgggcttgccctgaccttgaccgtctgatcaggtgaacgactaggcggagcgatgccaccgaatcgaagcccccacgtccaccaacccgtcgctctatcggcatctccaattttaaaattgacgtcccccaatttcttggctaagtgcagtatttctgcccgcttgacagtgtcctcggtttcgttgacgacatttcgatctagagcagaccgcaacagcatctcgtacgtctcctccgcctgttgcaggctggaaggtttggaaatgcgctctaggacgtctgcgtgtcgtgcaagaagatccaaagctacgcgatccgcagcgacttgctgattagacgttgaaggggagatgggcggatattcttcacgggtacttgacagattgctagggaaggcgatgccttttgttcgtgcggcttgaatagtacgtgccaggtaatcttcggccatgattgagctgggatcgctagtgttcaggttgtcggcggcggccccgtctctgcccgcgccgatcatgcttttgagcgcatctccgtctgaatcctgcgcagacctgccaatagcagtagcgccgctactaccgacgccgtactctctggcgagccaagcagatcgaagagtgtggcgagcgtagaatccaagggcggaggaagtgcctccagagaatcctcccgtccaagcatcgttctcttccgcccaagcatagactgcctcatccgatcgtgtatccacgtcccgactgctgatatggctagggtatgccatcatcacgttttcgacaaattgatgtccgccttcgacaccaagcaagcccgccgcggtcactcctagcgttccgtatagaaggtagcgcaagattttggctagcatgctgaatgtgtacattgcgggtgtcgaatagtcctcccggggcatatcatctggcataggatgatcgtcaactcttccgtgagatctcgtcgcaggaggtaggtaggaggcagtggggggttgatagtctggcatgtggcccttggaaatcacacgagtttcgcaaaagtgttggcgtcgcgtcgagtctctgacaagggatccgggcatagctgccaacggggatcgtttgccacagatttgtggcgtaggacatcgaatcggcctcgccgacgaagccatcagccggctgtatctattcatgacaggggcgattgtccgtactggttacccttgcccagatgtgtggaatgtctagcggagttgttgacccgtcgctcgctgtagccttgcagcgaaacctgacctatcttctgtcaataatgcgtaaggaaccttgacgaagatctggcacgcgatgacagaaggagtggtccgacctgtaccaataggccagtaatgaaagtggcgccggcgagtcgtcgaattcgcctcgaatacatgagggttagctaagtagtagctagtagctagtagttagtagcagtcgagagtgtgtaatcgtaatcacaccttggcgatgccaaagccaatttgcactgacgagttgtaaaataacacgtcatagtttactgtaatcgtctcgatcatgccgtcattcttgggctcgtgtgacccttctcttcactttatttgatatcgtccgggatcacactcttccctctctccggctttcgctcttctggttctgatgctgttattattgatgagctgctttgataaaccctgcacgttactcgtcaattgctttactgttctcttcattgcatggccagaatttagcgtcgtgacacccgtcgcccgattcacagaagcggcactcctcctttcaagataggatcgtccctaatagctgtagcgctatagcaagctcagaccgtgtctcgccgtacaccaagattcgcaagccgcagccatgttctggcggatgaaccccggcttgaacgcttcgtccaccttggaggctacactagatagggctcttggggcaaacggcggagaccagagctcgagtaaccagtattcggggtcgagaagctccgggggtggaggctctaatggcggtggcatgcacaatgtcttagaccaactactggacgagacggatctcttgagcgagctgaaggcggggaacgctaggtccgtgacgattcatgtctgtgcagcgcgttacatgaagccaaagagctcagtagctcagagaccgtcaagctgatgtcctggctacttttcggtcccccgaaccattgcatacaatattctgcgtgtgaatcttgtttatcaggctcatccaggtcctgtcggcacgggacaacgtgcgaggtctgataacgtggtcagtgtacggaacagacgaaattgaacggcatgcggacacggccgagcgaagagtgctggaggatctggtcaagcagggtggcctatcgaagtcaacttctcacccccaaggcggggacacgttcggtctcgctcagcaaaatgcttcaaagacccagagtaatactgcttcaaaaagcagtgaatcttcgggaagtccgaccagcgctctctggggtaatttctcgaatgcttcacctcaacccgacctcgaaggcgatgcgaaacggcaacgatatccccacctcgcgaccgagattctttgtgccgattacttccagattagtgaaaccctctggtcagatcttcccggtctattgggcccagtatgggacatcatactcagttccagggaggaggcgctcgggatgccagtcatcgagggttatgatacggccgaggagcggtcccggctcagagctcatgtgcggtatgagctggacattgccaagagcgagagagatgaggacgatgacaagcgtagggaaatcatacgagggaattggactcggataaacgggatgcttttgacaaagcgacccgcgcaggttcgttctctcttgttcgctggcatagatctcgggcgaataaagctgagcttggggaccacttgccttaatcaatcagatgttgaaattcatccaagcgataccccgtgtggtgtcgagacttgttgacaggatcgacagtccatccgttcaagacaccattttgcggataataacttgtgaagaagccggtgtctctggtatcgtcgaggtttgtcttcccgaactcgatgtggaagtcagctcgtctgtctaaatcttgcggttggttcaccagtggttacgtcaagagcgcctgataccgaagctcttgtcccttttgtccccatatgaaaagccctctacccactctacaatagctgaggtaatcaaggcgatcatatcactgacgtctcctaacgccttcaatccaaatggaggtaacggtggagaacaatcagagacgggagtatccgcttccgaaggatcaagcgctgccgctattcccggtacacacagctcagccgaccccgtctccgagaattcaaataacgccatgaacgattcaatcacgtccaccggtcagagagacaaccgcttgatacgggagctagtcatgcctgataacatcgccatgctagtggagcccatgagaaggattattaccactacagacagtggtcttctacgacaaggcggtacccttgtcgaggtggaactgaacgaaaatacagcggatgccctgatcaccaactcgacaggcggacaaccgagaaccgagatcacaccatactccttcgacccttacgaggtgaacaaattaccttcgattggctccaccacgtcgtcattctgtcaatccatcaccatcctgatcgaactaatcaggaagaacaattcagattactccgagccataccttttccactcgatcagaaatcgtctgatgggcatgcagcagcgcaaagttgagactagattcgaggcgaaggacaaggctgaacaagaggacaagcacacatcatcactggaagaggatgcacaggatagacaagatatggaagatacaatggccaaaatgagcgaaaagcttggcatcgtacacttgggcccactactttcccaggtcagcgagcggataggcgacttgcaagaggcgattcttcacgcacgtcatccggtaagttcgcttcgcgagagaacgaagtggccaatgctgagacggcgacgacaggaacgagcacgtatatccggtgtcccgaaccctctcacagcggaaagattccggattgtggagctttacgcagaaatgcttcactgctccaacatgtctatcctcaatagggccacaggttctggtcccgactacaccgccgacggtcggctagagggcggtcttgacgcgcttgagcgattaggaacagccttggaaggcgtcaacgaaacgggcaacggcaatgatgaggtgttgaacgaggtcacgcctgcccgagacctgccagtcagcagttctggatcgacgaattgttccttgaccggctccgatgacgagggcgaaggctctacgccggagcgtactgctcaaacagactcacctggacagcaatccggccgagccgacctttttactgtgaccacttcatccgaggacgaggaggatgaaccctctaccccgaagcaaatggcgtttgacgatatggcccacgcgacggataaactcaacttgtccgcggaagcttcgtacgagcccgacgcgaagactgcgaagaagtcgcccagcatgcgtcaaacgactatcgctttggcagatgtcaacgagcgggagacttcattgccggtggtggctgttggagatctgctgaagcagatgtacattgaacatcgagtactcttcgctgtagtggtaagtctggccgactctgccgtcttgaacatatctgaccgagtctccacaggacctctttttcgaacaccctagcaacaacttccttcacaacgtgacctatgatatcgtccagcaggtgttgaatggccggatcgatcaaggatataaccgtcgtcttgttcgcgaactctttcaagacgcaaaaatagcggagaagattttgcatactcaagcgctaaatacgcagatgaggtcagtgacggtgtctgcaatgataactgctcaacgtttactcatgcaattgtacacggtagtcaaggccaacgttcaaggcggttgggcctgatgggtcacatgcttctcatcgccgacgagatagagaagttttttgagagatgccccttggagctctatcagtctatcgaaagttctttcgtgcgaacagaatgggatgcctttgtggctggtgagctaagggaaagtcgacagcgagatgcgcagccactgggcggaggtagaccgtcggctataacagcggccaacgctgcaaagcaagaatctgatagtggggaagaggacgaggatctcacaggcgccctggctggccagccgcttaccagatcggcctcttctggtgacgcgtttagcaattctttcggcttcggtacgccggaaggggaggactctaggttccgcgtggtgagcaatagtgcgggatgcttgctatcggaattctgttgaaccaaacacggagttacagttcaacaaatttttgaccaacgagacatattcaggttctttcgcatcctcggacgaggacagcgatgacagctccgaatcaccgcgggcaagtcgtggagggcgtcagcaaatgctgtctgacgggtttgaagtaggtcgcatcctcacgacatctcgatcgactagaacgctgatgctatcaggcctatcagaatgcgttctcaccttctagcgacccgggcgagatggacgatgggtttggcgactttgttgccgctgatccgtttggcgattccttcgaagcaccctatcaaaagccgctccgcatgagcatacatgcgaaccgaccgatgacggcggcagactttgccaaccaagcgttccgagagcagttcgctggggagtcgtcaagcagatcccaggccgtagatcagagcgatgatgacgacgataatgacgacgacgatgatgaagacgacaacgatgaagaggcatacgaaggagctcgtggcaagatcgtagttcccggagacgattctttcgagtcggctgcgcaattcctggcagccaattggtccgtccctgggggtcacatacaaacgggagaggtcttaccgcctgcaaggttgatcaattcgcaaggtagatcgtgggacgatacggcttccttgtcaagtgctagcagccatagcagcctttccagctcatcacccggttcctccccggaaacgatcaaatcgctgcatccagctgcaaaactcgggcgccggtcttcgaggtcgcaagcactgtcccctcctgaccctaccttagtccgagcgaccgacccgaccgagccctacggtcatggggtttctgcagacacgaccgttcgtgaggatggcaagctggagcgcaacatcaatgggcgcactatcacagctccgcaagacgacatttcactcgctgcaaaccatgctcgaaaagcatctcgctgatgaatatcaagacgaaagataccgattcgcattacgagcgcatgcgcgcttgattccacgatgcgcaaacaggcgaaatcgtcaatctagttgtactcgagcatagcgcatgacgttgtatccaccgaagcgaatagtgcatgctcgccccttgatagacgcagctcagaccagtcggataaactatcgtagccgtagatgctcttcgaagggaaagcaaagccccagagatcgcaatgaatttgtcaacatcatgtatgaaacgcgcgttgtacaaaatccactgctgaattgcgattggtctctctccaatctcgttcctttctgaagacggtttacgtctacttcttggaagcggcctcctcggcggccttctgtatattctcgaacgagacgggcgcagcttgtgtaagcgacctgggtgtggctagcggtgtagcggtggtcgttgttcacttacggcgtcagccctcttcttcctctgaccagcgttcctcttgtcggccctgaccctcctcaaagtcaagaaagcgtcgaagttcttctcatcctcggtgatggcacgaggagcctcggcctcgtagacgttgggaagagccaacgaggagcgagtggtatcagccttgagctcctcagcctgcgaaaaaaggaaacgagcggcgcgccaagcgggttaatatcgccggatcgcatcgctaagagaccttcgcgaacaagtgacgtacggaagagtcacccttcttggccttgccggccttcttggggaagacgatcaacctgctcctgtattccttgagcctctcgacgttgatcttctcgctctcctcggaccttcggttcctcctgtggtcaatgacgatacccaaacccttggcctccttcctggcgacaccggcttgcttcaactcggagagggtgaaccctcggccgagcctgaccttggtgttgtatcgctgagtaggggcacggacagcaggtcggagcaactggaggggtcggactccgagggtcaaagccttcttctgacgagcgacacgcctggagtgctttcggccgggctggtcgaaccaggtcttgacacgctcctacaaccgacaagacaaaaaggcaatcagcgggctggtccggtattgttcaacggcgacaagggcgacgggctccatggatcctccttgacgagctggaggataggcgagacgaggacggggttcgagggaaaggatccagcgttgcaacgaaagctctgcgggcgtccagacagctggccgatgtcattggtcgtttcgagcgatcattccatcggctgagcttgtgtctccctgaccggtgtgtgcaaccgcgaacccttccaaagaagggaagggacgagtcctggacagtccctattgaggcacatgagccaggtgtcgttgcccggtccccttcctgtcacgccgatcctccatatctgtgcaagaaaacctgaaatcccgacccctgatccaatattcacctgccagctggacttcctgaaatgctcgttggcaagttggttgttgtgggcgaccatttcgacgagtctgagaaagtttgcgaattcgagagatttagggtcaggatggcgctccaaagggcgagaagtactgtcgagcgagaatacagacctctttttgctttctcttgaaggaagtgccgagaggggtgaagggaaacggtcaggaaggcacgtctgtatctacgacgacttgagcctgagcgtcgaggtggggttctcaaagcatgggaggacaccttgcccctccctccaccctagcatcccagccagccgccttgcccgcaggaaacacgaaagggtgtggccaccgctcgctcgctcgctcgctcgctcgaccctcgtccccccttgcgcgcgcgacagagaacacccctctagggcaactcgttggacgaagagtctcaggacactagcccccattgggttcgctcgctttgcgcttaccttcagcgtttggtgcgctttttcatcagccctcctcttccagatctcacgttatcgcccgccgcgcgcgaccgactctaacctcggttgagagtttggcgtcggcgattagcgaaaaagtcgcgttccgacgccctttggcctcctttgacatatttgtgcatagaacgtatagagaaagagacaaaggggcctaagattgatcgccagcccacaacgatgcgcataccttgttctcccttcgtacgcttaccgcggcgcaactcatgcctttcgtcacgcgaacgatcaaaggccccagtcattcagatgtaccatataccttcgtccatggtgaggtcattccatgattccatagcgatgtaccgcctagagtgtacatcaatctgcgtagtgaagagcgtactctgaatgccgtctcgcgtcttcaattacaaaacacagagagctagctccagtacatctgcactgttcaactgcatgtgcatgacggtttcacgtctgcccggttcctggcgtctcactctcctctgactttcctgcgctcaagtcgtcgttccgcaatttgattccacgacccacgaccttatgaccaacaacaacattctccgtaaagatcgcccgatcgttccccctgcaccgaaaagagaccgctctgctcggatccaatggggccaacagcgggacaatctggcgggcaccaaaggtgacgagaacaccgtaagatcagaagaaccctacagccccaaatctgcgctgcgagggctaggactaaagcgtccagccaagtcggtgcggttctggaagacagggaaagccgaagatccagccacgcagtcggcaaggtcgagctcggtcgtcggacgatggccgagcatgtcagatcacgcgggtctcggatgcggttcttcagcgccatttgagagccagtcgcagccggaggctgtcgcctacatcccgatggaaccttatgtcagtgtctggctcaatcaacctgtgacgccagttgtgtcacctcaattaccgcttgttgcggagtattcgggagatccgggctgggagaccacctgggtccctcatgtcgcgcctgccgactccaatccgggcttgagccagactttacgtattgctgtgcacgattttcattcggctactcgctgatgagagcgcgggtgttcgtgacggtctcaacagtggaggcgccaagttcgacaaaacgcatcagcatggcctacttggcgttgctactagtacggcgatgaacgatgacatagccgactaccgcgatgtctggatatatatcaagacaccatctcaggctgatgtttaccctcctgattggatcacacgtccctagaccatgctcggatcgctgaccatcacatagtccagatgatattaccgggtgctacaagccacgatgatatcgtatagactgctcccggagtaaaaaaaaaacatgccgctcgacgaggatgcgtagatcccatcatgtcactgtcgacacctgtcccccgccctgtcctagatagcaggctttatcagctcacgagaggaacagagggagagctgcattgtatgcgatatgatcttacgatttctacggtctcagctgatatatcatcattgcgatccaagcggaccttttccagcggcactgcgctttccactgcggacgttggtcggcatcccacgaccctgttggccttgaggcgcccttcttcttgtagcgatctggaagccatcgtcttgtgcgggctcctcggtcttgaggggcttgctgtgaatctttccgctcacatgggactcgcccctctctcggcctcggctcgcggtcgataaatcacgttgtcgatgttgtttaacaggaactcgatgagtctgtaaattcttggatgttcggcgagcattggcttgggaagttgttttctgtacgtctgtcctgctagctctaggcatcgctttttgcacgatcgtgggttccatactggaggctgactttttaccgaggatcgctggcgcatcggtgttgcctataatcaccggtgatgcgatggttcccgcagcagtcgcaggatgaggtgctacgggtggcatattgaattgcgcccgtatgcgagctaattcgtcctcgccagaatgatcctcgtcgtcatccgcccaattgaggccgactaattgagtgatattaggctgagtagatggaagctgattctaacacgatgtttgaacgtttcgatcgtcaaaacaggattgcatgccctacgcgagcagaacataccacagttgtagagctggcggatgatgtggtttgaaattcttttgaagagtcgctagcctgcgtttccattgttgcgactagatgttgagccggcctggtgacatcatcgtcgccgtctgcgagttcgctcgactgaatgaagctcagttgagtttgtgccggttgtataggtcgtagcccttgtgattcgtcgatagaacgatcggaagtttcaggtggggagcggacgacttcatgcctctcgttctgcgggacggcgtcttggtaccgaggcaggtgatgttcgggtaacgaggtcggctgcacccgaggtggtgaggagcctggcactgaatcggaaaaaccggctgactcctcctccaattgtcctgctagcacgcgtccaactggtgtcgctgtccatgaggagataacgcacacggtacggctatctttattaatcgcagacacggagggaggggggtctctttccaacttacccgataggcgttgcatttgctctaaaacggcgttagcgtcccccgatttgagtagatcgaacagttcttcaatgattcggacgtcattctgagacagcgtctgaagctgcgccggcaattcactcgccatgaaattggaggagggaagtgaagcaggccgaaggactgcatgcgttcggacaagcgccgttaacaaggggaggcaagcagtctttaaattgcaacatattagcggctttctttctccgtcatcttgagcgattgagtatggctttcgacttttacagaccttgtacgcctcaactgctgcggctatagcatttttctggcgagactcggtcgcaataacggctgctttagctttttcattttcctcctcagcgatagcctagtcggaccgtattgtcatcaattctcaacccttgaccgaaaggacgagagtctagagctaacctctaggccagggaggagctcttctaactccttcgcagccgcttcgagggctggcagagaggctagacctgccttttggtcggcgttcagagtctcgccgtcccggtacgatcgaaacctttgctaaacaccgtcgatacatgaagtagagttgaggtaatctggttatctgaatagaaaatcaaggtcataaaaatagacttgcaatctttttgtttaaaacccgaagccttttggagactagttcgtgtgcgccggttctttgagtaaccccttgcttttccggccgcggcaactctcttctttctagtgtaatcgtattgaaaggcttggatgtatcttcagcttcaggttgcatctgggccgcagcggaaggcacttcgcaatggtcgctactggattgatcttcggaattgccttgcttcttcacagacagcatatcgatctcctcgggactctgggtcgtcccgaattgtaacatatttggccgagccggagactgggggcctggtaggggatgggactgggggacaggactgaagatgatgaaacgatattcgatcaatccaatcggccataatgatgctgctttaagctactgtaccgatatcttacagctaatgcgtctgtgcttgacaggtcagccttattacagccgagatgattcgtaccctattcatagatcattgaggacaggctgacgaaacagacgtccagaaaggagtgttgagacgcacgacagcttcagcagctccgtaggtgtagttgtagtgccggtcatgggttgcatgatccatcacgttgcgtttccggcggtatgaagcgtaagtccggaatcaattcggaagcgtagtgagtcgtcatcagcagcgactatgcgggtagagggcacggtacgcttatggacgatgattgcctcgatatccgggtagatatgcatcgagcttgtagtcaacgagacaagatcatggtggaactcgtacataagctaactatcttgtcataacttccgcctggatcgacgttcccgaaatcgcttccgagctgtcgagactctgatgaaatagggtacctcaacaactttcgtaatgaacagtctgtcttcacttgtgagtgtcttttagtggtccattctggtagtacaggtgatattgattctatacgagaggcaggcagacgtagtgggcacttttcaagccgactatgagtcagccccgtaggtccaacctatggcctgtttagctgggctcatgctaaaggaatcgattcaagtcagccccgtctcgtcccctttgagcgagatcagggatgctgcagaaagacttttggctttacagtcccatcttttcggtgagctcgtctatcgtcttatcgcctcacatgttcacgaaattcatcgttaatgcgtcgaatgacactcgaaacagaaatacaagagttcagacacggccagaagaatatgtcgacaccttcagccgaccagcccgttacgcagctcaattcattggacagcctcgtgcataatttcgatcttgatttggaagccttttctcgcacaattcagtcaatcacagagcaggttgaagcgctaaagacatgggtcgcatatggcgtgactactgggacacaagacaatcacgaaacgctgcgcgaagaattagacgatctacaatcggattgggcggatttggtagaggcagatgtgagattgagggatgagctcaaagaggaccaatggcttgtcgtattccggcagtgagtcgaaaatcgaagacttctaaccctgcgaaaccgtgcgtaggctaacgcaagccagacgttcagagcagccgagtctgcgcatgacatgatgaactcgctagagagagcacaagctcagtgcgcagtgagctaaccgctttacggccccagaactggtcgcccaacgatcgaagcatttacccttctctcatatgctttagctctttgtcgataaagactttcgctcacttcaccctgctagcgcagaggctgcggggtcagctctacgcagctacgatgagaaaaagaagtatgcaggatctattcattgttgacttcggaggtaaatgatcctgctgacccatgaagatgcgtgtcaggttctatctgccgagcatcagtaaagcatgtgacatgtcctcacgcggtctggataagaggttaactacgaatggggtggcgatccgcaggtgatacatacccattgacctgtagaataagggtcgaacacactgacttacctggagcatttcatcagccttagcgatctattggcccgatgggaacgtgtccagcgctccattcgtcgtcttgacgatagactcccaagtttgaggcaggattggtctacatacatgcaggcaaaagatgaggatgccgagtacctcctcgatggtgagataactctgtatctgctggcaaggtggcaatgggctgaatttctctgcttggacgcagacgatccacattcagcacaatcgatgttcgaggaggttcgctcatggtctcatgaagagggccaatacaatagggtagctgctcgtactgaacgatttccgacaccgcatgatgcgcggggaggaagggcgacggcgagctctccgagcctgactatgtgcacgccgacccgggcgggtagtcatgtcgcagacggatccccctgtgagatccgtcgttctgaaacagactacagcggcagtgggatcgccccgccagggcgacttaacattgtggaccgcgctccacaagtggcaaatcccggaaaggggtataggagcgggcttccggtcacgcctccgatatcaagggtaataaactccttcaatgcccctggttcgaagtcaccaactggcctgcctaaccggacttccgggcgagttccagcgagaggcgatacgggttcagttcgcgacagccgaccgatttctcccgccacatcgatctgttcaactcgatccaatgtcacgagaatcaacaacggtcggaggtctctcattcccgtggcgagtccatcagctgtttttcagcgcagtaccacgagaatgagctcgtcgccaccacccgtaccagcgttaccgagtcgagcctccatcgcagatagagagcgtgaccttcgggcaacacacctgcgagccatcgcacagacgcctgagcccaccttgcgagctagggcttcgcagatgcccttctatagcggtcgacgcaacacgtcaaatcagtttatcggcacgtccactcctggctcaggttctccttcacgtgatagaacgacctctaccgaaaagaagcaaggcgactctaggagcacccgaggttccgccccaagtgcttggaaagaacagccgcacattcgccctgggtcttccatgtcgatcaagtctcgtgccggatcggctacacctttgccaatgtcgcgatcatacaaaggcttcgttcccaatcctctcgattaccttgacgtggaacttgcgaacatcctggaaagcatccccaacgatgtcgtggtagagaggctggacccaccactccgcaaggggcaacgtcatgaaggggaatggagggctcaatatgctttctcgagtggacgtcacgggcgccgcatatacccatcgaggctgcttgagctgcataagccacggacgacgaacgagaaggttcgcaaagtcatggttcgcgttgacggtctatggcgggatgttcggcttgtacttttggagatggcataacatcatgacgacatgtctcggtacggagtccaaggcatagttcaggcgagtaattcgtcgaattctagccatgcgaacggcctcgtctgcaggacgcgctgtaattcataatcaacccataaccctgtttgtcgaatcaaaacgtcatcgaatcaacggccagatcgaggatgatagacacggagggactgacgcctgagaagaggacctgggtccggagcgttcagctgttcgcacctctccggatatttccctctcaagacttcagcgaattgatcccagtatcccgcctcatctgccgtttccaacccatacttgaagagtagtccccgtagagaccggcgcaagggacataggacatctgctttcaaggagcctgcctccacggcccatctgtatcttagcaactaccgtagttgacgagagatgagaagaaggtcagatcctgctatagtcaccgaaaaaaagcgatagcaactcgctcgtagtgaccaagaacatgtttggccgtcaagtcggcactctttgttcatgaacttctgcgtagcagtccagccatttgcagacgattctccatacagacagactgcgtgacgtagagctctgatctctcgatttgtccatcggcgatatgcagcatcgtagtcagtccagccgttgatattgtctgagtggcggtcatcagcggtagtaccggacccgagaggcacatgtcgtacttgccctgctctgcttgttcaatacctcctgtcacatgcacctcgtgctcgatctgatcctcatccccctgactaatttcgatgaggggagatacctctggcgcaaataccggctgtggctctcgagagatacgcctgttttgttgccagactgcgagccgagcgtcgctcatcatgtcgggtctcggtcaactctcccattgaaggaccgcaggtcaaggtaatcggcatgagaatatgagatgtgatagagtgctaacatatacgagagccatcaaagcgagaagcaaagcagaccgtgatcggttccaatatgatcgtcgtcgacgtcgttttcctcttttgttttaccaccgggtatgctacgtatgccaagtacgatcgcagctcgctcatttcgcgaatcagtcgcgatctcgcttggtggcctggcggggtcatgtttatgtctatttggaactagcataaactcgataatggccaggcagagatcagatggtcagagagtagcttaagtagcatgagtagctgaagtgagctgaaggcgaatggcctggcgtagagcccagcgctaggcggagagggggccggggaggagccacgcgagagagcatcgtgaaggtgatcgtagtttacttgaagtgatcggaggcgggcaaacaaggatccccacgacgacattcaacattgcactgatcacttcacaactattcacttgtctagacacataggaatcggttcgttcacttcttcacattcgtcgctagtctggtcacctgcttcactcgtcgccgggaatttttgcaacggaaatggcttcctgatcatctcttgcttgaaccgagtatgatcctttgttgatcgtaagcagaactgccttgtcctcttgtcgctcaatgatatctcaattcaccccactggtagaacttcttggtaaaaactttggtacaaacaccttcgaacgataacgcaaagcttactcaagatgggtatcttcaagctcttcaagaatccctcacaagggcagaagctacaatcgggatctgattcggcgagatcgacttccgtggcagatacgggtacatccgtagacaaaagcttcaaagtgccgaaaagaggcaagacagcattggcaagagacgatggagccaccctacgaacgattccatatgcctctttgactcgtcacgaacagcaacttacgtctgacgcaaggtcaagctcccactcgacttcgctctatatggaggctaaagatggtctggaccctcgacttcgattggccgaggaaaagaacgacgattcatcgcacaaagatgctgggcgtcttggtgccgagtctatgcaggatcatggacgtacgagccgtcatgtaacaagtcccttgttcaaagctgaagcgctcaaaccactccctatgcctccgaagcgggcgggctgctcaaacacgacagacgtccgtcagagacgtagctttttcagcctaagaagcttctccggtggcaaggaaagtggaagcaacggattcggagaggggccaagcgcaacgccggtggaaggatcaacccgacaaggttcgcccgcagtgactgccgagccaatcgatggcattgaggctagccaaagacccgggtattccaatcgaagttctggccagggcttgaatcattcatcgcatgaagcaagtccaaccgctgcggaattttctggcttcaaaacggaagggggggcttcccggttcagcttcagcggtcgtgatacgctcggaacaaatgcgcacaacgctgtgggtgaaggaacttcagagtcggattactttgaggtccggaacttccggcacgtatctggccacgctgggagtccctggcaacgatcgatggcactgggctcgccacgaaccccatctacagtatcggctcaggcagaaatcatccctggaacggcgagtcacgaagaggttctttctgatctggttcggcccatccttcccaagctaagtcggcctccgtcctttgctggaagtataggaggcgaggagccccccagacaagtcagcgcgcaagtctttcgacaagcccgtagacaaagcacttccagtgtcttcacactggaagcatatcaacagcccgatgaaccagaggaccagaccgctcgacctgatgttttggagaatcaggtgactcagctcagaagaacaagcactcgcgagagttcggtcgagatgcttgtgtctcccaaacgtaaagcgatgggggtatcacggggcgatcatgtggaggctagacacacaatgtcagagtcacatgagcctgatgatcgatgggtggatcagatgaacgcggtcacgctttccagcgaatggaaatttccaaagggcggtcttgaatcggtagaccaatcttcggaagccacgcccccccccgcggccgtgcgcggagccaacagggctgctgatgtcacttctactcagcgaagagcattcagcttcgccggcacagcggtgggacagatcaacacttcgggcagtcatagcaagaccagcgatgagcgaactattcgttttccagatagcctcgtcaagattcatgacaggtcacggtctacctcatctatgcccgcggggaccttcgggatcagaggagaatctcaggccccaaatcggatgcctctcagcgaaaggcttgcatctgctacatccacaacgccttccacagcaatcacgcaggattgcttgatcccgcctgtggcaatagctgagcgttacccgaagcagagctttaaacagacgagcttttctagtagctcatcattgccgaggattgatgccactttggccacggcaagcagcagtccgatgccgtcgccggtacgcaagcagcgcgcccgacaaggatgggactcttcgtcagacgatagtgatgatgagaaaccgcagaagagcgcgaaaccgatagctacacagtctcgacagcgccctggcaacaacgcacggagtctgccatcaggtgtgcgcaagccacctccaccatcagaagcttttgggcattcggaatggcaagaggcctctctcggtcgacctgtgacgagtgggagtcgaacgtcttcctctcgctccattcggtcgcttttgtcccaatccgggagtacaaacaagttcatggcaatggatcgaacgcctcaaactcaagaaggcagcgatgcgtctagcagcagtagtgacgaatcattggcagttattctgagaaagcaaagcaaaacatctctcaaggcacagtttgctgcatcggctcccaacctcgcttctcccggtaaacagccttattctccctcaggggtccgtagcccgccggtgaaatcagccatgaaggctagcgtcacttcgaaacccgaaacagaaaaggcacctctacaacgagcgttgcccgtccctccccttgctcctgcacttcctttccatcattcagttcctggttatagctcaatccattcatggccgcgggagtcccctgcatcatctcagagcggcacgactggcgaggcgtccagtcgcaacggaccattgacgccacaggatgtgggcggagtctcccactctcctgtcgggctttctggaacatatggagacaagcttcccataggtgccacgtcgaggagagtcagtttcatgcacgcggaatgggatcgaccatttgcgaatgatgagccgggctcagatcgtcaaatggcaaacggatccgaagaggtggatcaagcgactagtagtgataccgtgagtacctcgtgtccttgcatgttacgttaccggggctgatcggatcattgaaggcgtcccgcttccagaggcgtctagagaatttcccagctattcgagatgggggattgcatcagtcgcaggttgataccgggagcgtgtcctcgcagcacgacatgcacatgcagatgcagatgcagatgcaaatgcagatgcaaatgcaaacgcaaatgcagatgcaatggcagcagtatcaagcagcgcagctggtgccgagctacgccaatatgcaccagcaagcgtgcgtagatccctcttacttaatccagcatatgcttatctttattgcttcacagtatggcagccgcgaaacaacagtatcaggccgctatggcagctgctgcaatacaggctgccgacgaagcctgggagctagccagtaatgcgggcggagttgcaagcggatctcaaggcgttccggcgacggatccctcggtcaaccgtctcttccctttcccccagttcttgcacaatcaaagcatgcagaatcggagtacctcatcggtctacggcgccccgaccttcacttctgagcccagacaagcccgctctgagtctgtttatggacgcagcgcgtcttcggtctacggggctagctttgggcctcccgctccaatcaggtctaagcgcttgcaaactcggaacgagcctccgaatcggagcaggaccagtgccaagtccagtccgtcaagccccagtaacgacatacacaaggaacgccagaaagggccagagtggaatcaagacgaggttccataccatcaatacgtctcacccattccgccttccagttggaaagggtcgtctgcgtcacgttagatgcagagtaatgaaactaatgaatgcgaacataatgacacttcgataccgcacgtacacctttagtgaaaattgtatagataggcgaagccgggttgacaaagcgatagacacataccccaagtccgggtttccgattgcaacgttcctcttgaggaatgaaaccgtaccagaatgaagctttcggaaccgcacgatttgcgatttcaccgagatcgcagaatgaggaaaggaggaaggcacctcacccgagtaatttagacacagaaagaccaacctaaagtatacatcgagatttaatcacgaacatgttcgccaaagctacaaaattacaaagcgactgaatcagtcctgcgaaaaacgaaagatggccaacgggccccacagcggattcgcggttgcgatgagagctggtcgtcaacggatcccagtctgaatggaaagaaatgttcgcgcagactacagccattgcataggaatagactttgtgcagggtacacactattgacacatgcttgtgtaccgatggtgccgcctgaaatacgtcaaacccacgggctcctcgcatcgctacaagatagcacgggatagtttttcgttcaaagtggacctgcatgggatctgcagcatcacttcgtgtatcgcacttggtactttctgaaaagctccactgccataccatttcattgcttcgcagatggcatgttgaggaagtggacacgcttgtcgtttgaaacagatatacgcttccgaagttcctatcgcaaacggaaagcgttttgacgatggctgatcactgatcactgagatccgatgagactacaaaccgtcactatcttccgcccgaatatactggttgcgcgagagatcttatgggaactgtgaattcgtcatcacctgtcagacaaatgtcgtggtgaacgtcgagaaacgtacattatcccaagacagtcacctgttatcgcacaaccatgggagcctagagtccatagccagacgatgtgactagatgatgagcgagctcgaagaggatctcaagcatactgggacacagatgcaagtagtcaatagaggtgctattgttctagccagctgcgggcgatctgcgggtacggagtatcagatcgataatgatcaattgggaatgtggtacgacattaagtaggacgtatttggtcaaccttagccaaattcagaacgtgggttgctagcatggcaaatcaacagaacaaacagaagaggagagaacaatagacctacacaaacgatagaaattttgaacaaagtacttgactgccatttgattgccgacaaccaatcctgactcagcctgctgcgccggaacccaaacaaggaactgtatagcaagtacaatctataagtctgtaactacataagggtagcaagataaggattagtggattgcaagctgtagtttctatttggtctgtgcttgcttattgcccaatcctcaatcactcagtatgcctgttttggttgaacctgtacaattgttaaggtgggttagctaaacctattgtgccacaaggaccttgactgggtcaatagcaattttactggttgttggaggtgcaagctaaatatcaaagacttgttgtggaaggtgtattgttcaaagcctgggggcaaggcagtgagctcaatgagggatgtcaaaaggtgagaagagtagcatgagagataccttgcaatctctcttgagctgtccccaatatatactcattccccaatatatactcattggcaaagagccatttggcagtaaatgtacaagtaatagctaaacagatatgatccatccatccatgtgtccatccatccagatgtccatgcttccatatgtcaggtcacatggctccttcaatctagatcttctcccagatacgtctctgtgtgaccaacattgtagtcagctccgttacagtaccctcccctcagagctaactttgtcctcaaggattcacactttttgtatggtttctgtgtgtgttctttaattccactgcaattccggtcaatgatatagaggaagtaattggctcaagttggacctgatcctgatatgtctcataagtattgtagcctgatccgttttctcctggcttggatttgggtgttttttgtcaaccacgtttactagttatgctttgatctttacctcatgtcactatgatgcaaggtccatttttggcttcaaatctgagactcccaaggccttcaggaaaattgccctgacagcagagtagctaggttggttattgcaacatgtaggaagtttacacataatttcctccatgttttgctgtttttattgtgtgtgccatgcttgtgtgtgcctgtatttgttgtaaatttgtcttcaaaatcagtttcaagtgtatatgcatggtgcaaggagtaagcactaggcataagaagcatatttattggtttggattggttcttaaacccagccccactttttattcaaagtatatatggttttccaatacaagcagatcagtttgtgttacggcggagcttcgctaagtcgcatctaatgaatatctagatgcaatgtcggtacggatcgtaggtagtcacaacaggagagaagccgagtttggctaatgggagcgaattcggttgggatgatacgaatccgggttgatgtacggataaggaagtaatgttgctataggtagctaggatcgaaagcttgttcagtacgaccggtgagacatctactacttagcgagtgtcctggattgtaacctcttcacaatacgtcttgaagatgcagtgctgttgcaaatcagtaggcgtaaatagaatgcaatattggaacttgaccttcctagtacaagaacgttgtctgccggattcggtcaagttctactaagtatatatacgaaaccgagagtagtcgcagcgggttgagaacaataggcggtccaagaacggtgaagcgaattcggaacaaagagaaccaaattgagggtcgagaatcgaacatctaacaaagaggaattgtcgtttgctgagtcgagatgtctttgttcgatgtagttggttgtcaagatacaaagtctttgttgaatatccgtcgatattgctattgttctccaaaggtggtgatattgaatatgcgttgtgtcgatggtagtggtaacgatagcagagaaggtgacgagaacaggtgacgagaatgcgcgagccgaagctgtaagtgcaccagccggatgcgcgtcgcttcccgtaacagtttggcagagtggagttgtagtcacaacttcatggcctgttcataggttgcagtagggtaccagtgcctcataaggccatgccatttacagtatactaaatcattgtcctcagtgacaggtagtcttgaccatatacaccttggttgctaaggggtcctttctcccataggatcgacttgatataggtagtactgacttggtggcccccccatagtcccaaagtatatcatctcagttgttataacccttgtgcaccatctccattctggttatggtctctttctgaccatcatccccatacctatgccaaaccagacagcaataggccagtctggtagcttgtctttcctcctttgaaaagtctttggcggtgtatgcattgtgctgaatgtattcaacagaccttgggaagctgataggcttctggtgagaaggggtagatggaatacaaatatatggttgatgtcaggtagcactgggacgctagcaaccggatactccctgagtcctttcgtttcctgtacatgcctggtacacccagtggatactgtcccctccttgtccttctattatgatgttccttgatatcaaatagtcattgtgcctatcatcttctatctgcggacaacttctgtagcattaactctcaatgtagagaaggaccgcacattttctgcccccctgccctctgatgaagtgtcaaagataggccttggctaaatgctttacactccaggcaggaattgcaccttaggtctcccacctgtgattttataacagagcctactacatcaatttttgcaatggcgatgtgactcaccagcattctatgtatcctcttcctcatcgtctcccaagacttctttttggagcctatcatgtgacaatcttctatgatggtccaggatggtgctccagaatggagtctcgtatagccatctgtgaatagtacttctgcacctaaacagtatcatggggtgatactcaatgccaagaagcttcgacgtcttgtgataagttgtttttcctgccccgcctagagtcgcttaattatgccactatatctcaggtgtgtgaaatctcctgtttgaatctgagttttgtagtatcctgggaagccgtacggcttctttggctgtttccatcatagccatacattctgccctgaggatgaatatcttacacatacacgtgtaaacattctcgagcctgctactgaccagccgactcgttcttgttgcaaataggcatgccatgattggctcatggatgcaggaagcaatctcaacacaaagcctcattctgtagaatgtacattgtacgttgtacattgtactttgtacaatctacaggattcactgtaaaatgtgcaggtttcaaggggttgtggagcatgaaggctatcatcagaatagtatatataggaggccaattttgcctcatccccttttccctctcatgtactactctactttgatacaagcaacattgatcatcctttcacaacaaggcaacatctatcatctgcaagatacaatagacatggtgactacagtcattaccaaggagtgactacacaccattggcagcagccaatttcacaacaatttggagacgctaggactttaatatggagtctaagcgttaccgctcaggctgcagacagtgggtcacccccaagggatgtgacgcgccggagatgtccaaggggatgccccgagtgaaagtccgtctgttgacgttcaactgtactataaggcatctgcatcatcatatatacgatgacccctaccttcgcccctctcccgcttactgctttggtggaacgttccaatggaaccctccaccctaacaccaagctccagacggagccagcttggtattgacacggttcagcctggagcgaacttttgttagtgacttcacaaccacagttggtgagtgatctacgcaacctttcttcacggttgctaaccctctattttagggctgaagggtctgacagaacttttggccaaaggagacagcatgagagaagtaaagaaaagacagacaggcattgtcaatgacatatgccttgtattgtaacacaattatgtttttgatgagctgatttgttccagggcgcaatacaagtcgaggaaccatgttatacatgtcaggaagtatttgcagcctttagcttgagcagtgataccgcgcaactccgattttaatggcagcaatctacagtgggtacctgttttagaacaaaagccaagcggctgcaacttgtgttgtatcacagatctgtgtggcgtaattatatcagtgaacagacatgcataatttctgaagtaaccggtaatggcgacgaaaggcgttcttgtgtatctttagagttggcgcttactagtagtaccttgtcctgcctggtatctaggccaatgggtcgtcttttgatgtttaccctgacttgtgtcatatgtcatatgaggtcaatcttttgaatgccgtcttctcccttcaatctcatctggggcaagggcttctgttatatctatctcatgcgtccgcatgtaacgtgtcccggaagcacgtataccaacgccctctcgaaggcgattgtgtggctctacattgaatcagagtctcgttgattcctaagtataagttattcatctgtcatcacatcctagatatacctatacctcatttcttactcccaaacatgtaccctttaccaatctcccatgtctcagacgaccgcataccaaccttaaaacccgatagccttttggcgtacaccataggtgaatggtctaatgctagcgagtaaggaggactgttcctgttccttctctatttaatcaaattcttctggagcaaatttgtacacagcacaacagactgcgatatggtttaggatgcaagtacaacgctatggattgagcctagtccagcacagaccaagctgtacatgtaccgcacgcagaataccatcagatatgtgatatagtgaggcatgtttcttgactctaccaggccatatggagacgtgcaaatcagctggaacactgtcacagcggcgcggatggcttatgtccgatacgccccgcgcagaggcgacgcgtatggaccctgaagttctcgtactattctgtacttaaagagacatccgttttgtatttcggtagtgttgaagacgcttgagcgaagtttaggagctcaagcgtcgatattccgtctcttctttactactaccttacaagagctcaggtcacctcccctgacgtctagcctagtattgctaccaaacctctagattatgtacaaacgcgtaactatcttcccttccgttttgcagctagacctcccgtgacaaacacctaacagtttgcgccgctaggaggatccagtgcagaaatcgcgttcagtataaggatcctttactaccagaggtctactgtaagaggccacatactgacaccattaaaaatagcaagtgagagttgcggtaaaatgacccaacatgtacgcttgaaccaaaagcaggggaccaaatttacgttagacagaacagaacaagtcattctggcaaactggtaagctcatggagtctggccagtgacaatactgttgacacagagtgacaaggtgtcagacaaggagttaaagctgcattatcagacctgtcaaacggaaccagaaatgagaaatatatgataatgtgtgatccctagtaattagctcgtctatcatcattactactacaagttatggctcacctgtgatccctagtaattagctagggaacacagatgtgaagtagtctatgggagtatagatgatagatggtgaatttctatagggtgtaggagaagaggcgagaggcgagatgcgtctagagtcacgtgacataatggtctcctgaaagggagccttccatgattgtacagaagaatatgatttagaaatgcgtataaacctccatagagcgaagcatcagggtaaaaggttccactggacaagtagcaagagagatgccaacatagagaccaattttgaagagcaataacggatgcctaaagcatctggacattgtggtaggattaaaggtcccctatcgtacttgtgttggctcagaatttctttcgataacctgcattactacatcttgtgatgcatcccaaggatatttctgctgcagtctgcctgaccggcaatgtgagcgtatgagtggggggatattggctgctgccaacggtgtgtagccactccttggtagtggttgtagtcaatatgtctattgtctcttgcagatgatagatattgttttgttgtgaaaggatgatcaatgttgcttgcataaaagtaaagtagtacatgagagggggaaaagaaatgaggtccagatggtctcctatatatactattctgatgagcatgtcctcccagtgtacttgccactaggcttgttgcggatttgcaactcagacgcataagtgcaactccagttgcaaatgagtcacagatgtgcgactccagttgcataagcgtgacttcagtcacaacatgtgatcctagtcacatgttgaccctttgtgcttgagattgcaccctgagcgatacctataatgtcatagcatgccaatcttcaacaaattctgtcaacaagaccatccaccctaacaccttccactgtaataataaaacactgcatctcttccctagcggtccattgactaactacaaatggcgtgagtgtcttccaagccttttccaaggtctttgaaccttgtcagggagagccagccaacttccctatcgtcattgtgaaaagggagttggcaacaaagtccaccagcaactatgttgctccttcttgtaacaataccagatcccagggagagaaaaggtgctcttaaagccaataatgtccgtcttgcagtagtctcaacaccaagtctagtttgatgtctttgtggaattggcaacaagggtagctaagccttattgaggagagttgaaggtgaaaagtggagaaggtgatgaaggtaagagtattgaatctggtgtcaaggggtctgagttcccataagagaagagaaaagggatgcctttcctccttctggggactcctatatatacaccaaagggccagtggtgtgtgtacaagagttgtgactagagtagtcataaatatatgactgagtcgcaaatgtgtgtccacagttgcagttctgtggctgagtcgcgatagtgtgacaggagttgcaagatgtgattgtggtcgcaaataagtgatctcagtcgcatctttacacatctcagcagaacaacatagttgcctttcacaatttcatcgatacatggcctcagttaccaagctaactctctgcagtgctaccaagttagctgaattagacatattaaatacaggtatactgtattgctgatattgtttcggttcttaggtgcagctgtctgtcttacatcttgctgtctcaatacggtttggtagattgactttgtcttttgcgtttcacacgacgacaccgacctagagagcttgtgatctttgtgctttcattgaagaaggttcctgttcgactgatgatgtattctcctggctatcaaagcagtttgtagcctcactttatcctgctgtaacatgtcaataatgtcagcgacacacctcacactgttcacaccacattcccctgacaaactgaagggtaattagtattgtctagtaatgctttcagttctgtaccacacctgcccctcccttagatgattcgtgagccataggtaaagctctgatgagataggtcactttgtcttcaccatacaggttggatcttgtctttcaaaagtccagcaggagggggataaacagccgaaaaaaagacaggagtagatcatcacctttactcgttctgatcaagtcgacctcactttcacgtctaccttgcggtacttgtcatccacatctgttcggctaagtcttgtcgatgcttatcgcctccatagccgagtgcaatacagctgaggatccattttggctgaatagtctcccgagtctcgcaccaaggagggtccatggtaggggtagcaactatgtaaactgattgctacagagaccaagggccgcacatgtgattgcagacagagaacgcaggttgtgctcccctaaagctgcaatctcccaagctcaactctgaatgagtcaactttgacgataatctgagggtatcagctgtcagtggcaattgatggctttatgtcaatatttgcccatattgctgttgctcaaagcgtggggttaagtctcagggcggaaagttctttcagaaggttccaccaaggcagaaaggtagaggggagcaaagttggggccatggaggagtgttataaatgtataaggcattcagtaccatagtatagtcatgaaacaatgtggcgactttacacatactattccttggcagttcaggctgctatgtcatgtgacgaaattgagcatgtgaaatcgttgctattgctgattgtgtcagtccataatcaatgcactgaacagcgtaatatagatcatcaatacccagaagcaagcctgcgactcaaacacctcagaatactttgtatgattagacaatctgagtctagtcctgttatggaggtgttcgatgataatcgtacctgtagttatcaaggaccagaagtcagtagtgaattatgctaaggcagaatgaactcagcagtaggactgggttgactaattgtttatgtctgaccgtgaagtatctgacaaggatacagctgctgagcgttgcgtgatgatgatgttgaatagtaattgcgtaggttgtaaggttgtaacatgtgataattcttgttgggaaagaagaaagaaatacatgagggaatacaatgaccaggaaactgtcagctatatatatcaattttattgtattcccaaagttgattccgattccaataacgatgacaatcctgatcccgatgtcgatgccgatgacgataccaatgccgactctatgtgtcagctgactgaattggatcgtaacaagtcctcagatttgacatcagttggcagagacaagattctcgagatcacctgtgacaatatgtgtagaatatctccagggtcgattgatattggggatattcaagtatgccgccaagtgtagttggactgtgtcagtggttgatacaacaaacaatttgatagtcccatgcggtcaccaattgcacatagaggtgtactcatgaatgtaatgcttcacactgagtgctcaaaatagatgcaaaacaacgaccccatgatcgactttgctagctgccaatccctctgtgctatatctgatagacaaacactgtatctgggcacatttgtaatgtgcctgtagcaagaacttcttacggccgtctgcagtgtgtgtcctggggacctctgttgcaattatgggggaaaccattggccgcagggacctcccttgaagggatattctgaagtaggtaactggtcactatgcatatccgtacctatatctcttgatacccaatcaaaaaggccatgcagatctggtttagcaaataatgatacagagcattcatgccagcttcttgcctctcaattctttgctctctcgttaggtctgcgccggtacggcctgcgatagccatgtcgatcgacgcgtcgaacggacattgaaaactgagttacctccgacgcctcgcttaagccctgggcggggccgaaggagccatatgtgtaggtctcgatcaaaccagagttgtagcttgaagatcgaccgactgacctaattctgccagactcttcacatccgcaaaaccatcatctacccgggcgtgtgctacgacgactgtcaatatggctgacgaagagcgccgagcgctgcaatccttcactgcaccgaaagagattttggatgaattcgctgagctcgctgaacaggatgacgagccagacgtttttgagaacgcggcaaaaactcgtcaagtggccgctcgccagaatgactaccagcttcgacgattcaaccgagaggagggtgcaggagaagacgagtcgtacgcagagcgaatgcgacgaaacaatctagaacgagaggaggagagagtcaggaagtataaggaggacttggcggccaaagacacggaaacagagggcgatgttccggctcacgatgcaatggacctcgacaagacgcccccaaggaaggttcttgctctcgagggcgatgttactcctccctcctcctcaaaaaggaaactacccgatgttggagaagatgaatcgaagccagacgtcgattccctcaaggtcgaggaacagcccaggaaacggcgatcccgctgggacatgggtgccgaaggacaagatgagaccaaaccgaacgtagctgtagtcaagcggtctcgttgggatcaaacccctgcatcgagcaaccctccagagcaatcgatggccttcggcaattcgatcatggccgctccgttcgccacaggagtcgccctggtcggatcggcggaagacccccgcaaccgttatatgacagatgcagagttggacttgcttctgccatcggagggatactccatcgtctccccacccgctggttacgttccagtggccaagccgaaccgagcttccaacgttgacgcacatcaacttggcggtttcatgatgcaggatgaagcggctgcgcaggctgctgtagctgcggcaggaggtctcggtcatgccgaacctacagagatagaaggagtcggtagtctggcgttcttcaaaccggaagatgcaacatatttcgctaagatccttggggaaggggcgaacgaatcatcggacatcgggctcactgtcgaggagttgaaagagaagaagatcatgcggctgttgctgaaaatcaagaatggtacccctgccagccgaaaggttgcgctacgaactatcacggacaaagcccgagaattcggggcagggccgctcttcgacaagattctgccattgttaatggagagaacgctcgaagatcaagagcgtcatctcctagtcaaggtaatcgatcgtatcctctacaaattagatgatctcgtgcgaccatacgttcacaagattctggtcgtcatcgaaccactcctaatcgacgaggactattacgccagagtggagggacgcgagatcatcagcaatttggcgaaagcaagcggactagctcatatgatctccacgatgcgtccggacatcgatcatgtcgacgaatatgttcgtaacacgacctcccgcgcattcgctgtcgtggccagtgcactcggcattccagcgttgctgccctttctcaaagctgtctgtcgatcgaagaaatcttggcaagctcgtcatactggtatccgaatcgtacaacagattgctatcatgatggggtgtgcagtgcttccccatctacgcaacctggtcgatgcgatcgcccatggtttggaggatgatcaacagaaagtcaggactatgaccgcattagcgctggctgctctggccgaagccgctgccccctacggaatcgagtctttcgataacgttcttaaacctctctggctcggcggacgagtgcatcgaggcaagactcttgctgcctttttgaaggccatcgggttcatcatccctttgatggatccagagtacgcgagctactacgtcagcaacgtcgttccgattctcatcagagaattccaaaccaccgacgaggagatgaagaaatacgtcttagtcgtcatcaagcagtgtgccgccactgaaggtgtcacgcctacgtatatccgtcaagagattttacccgaattcttcaaggcgttctgggtccgacgaatggccctggaccgccgaaattacaaacaactcgtcgagacgactgttgagctcgcacagaaggctggcgttgcagagatcgtgggacgcatcgtgaatgatcttaaggacgacagcgaacctttccgaaaaatggtcatggaaaccatcaccaaagtggtcgaatcgtccggagcggcggacgtcgacgagcggctggaggttctgctcatcgacggcattatttatgcgttctcggagcaaactctagaagacaatgtcatgctcgatggttttggcacggtagtcagcgctctgggtaagtatccgtccggtgactgatcattcgatttgagactaacagagctgggtgtacacaggtatccgcgccaagccatatttgacacagatcgtctcgacgattctttggcgtttcacaaacaagagcgctaaggtgcgaatgcaggcagccgatcttgctgccagacttgctgttgtgatcaagaattgtggagaggatggcctcttgagcaaattgggtgtcgttctctttgagcatctcggtgaagaatatcccgacaccctcggaaggtaagttccttttgcatacgcgacaagttcaattcaaggttgaccctttgttcttcgcaaacttgcagtattatcgctgctgagggggccatagccaatgtcgtcggaatgactcaaatgaacccgccaatcaaggatttacgtgagctttgcatacctgggtctggccgctaccttttgcataactgagaaaacgaccgtacctttactagtgccgcggatgacaccgattctaaggaatcgacacgagaaggtgcaagaggcaaccatcaatctgattggtcgtataggtacgtttcaagtccgcggcaaccacgggtacataaagactgataacggacccgtctgtcgcccatgcagccgatcgtggagccgaattcgtacccgcaaaggagtggatgcgaatctgtttcgaacttttggatctgctcaaggcacacaagaaagccattcggagagcagctgtcaactctttcgggtacattgccaaagctatcggtcctcaggacgttttaagcgtcttgttgacaaacctgaaggtacaggagcgtcaaagtcgagtttgcagcactgttgccattggtgagcggttttcgcatgtgacatcgtagacaggctagactgactaaactcgcttatccatagcgatcgtggccgaaacatgcggcccgttcacatgtgtcccggccatcctcaatgaataccgcacaccggaattgaatgtccgaaacggttgcctcaaggctctttctttcgtctttgagtatgtcggagaaatgtcaaaggactatattcactcggtcgtcgggatgcttgaggacgctctgacggatcgcgaccatgttcaccgccaaaccgcttgcgcgatcgtcaagcatctaacattgggagtagcaggactcggaaatgaagacgcgctcgtccacctgttgaacctcgtctggccgaatatctttgagacaagcccccatgtcattggaggagtcatggacgccatcgaagccatgcgagtcggcctcgggccgggtgtgctgatgagctacgttctacaaggactgttccacccctctcgtcgggtaagagaggtcttctggcggatctacaacacttgttacctcggatctcaagacgccatggtgccgttctaccctaacttgggagagctgagcgatcaaaccaatctgtatgaccgtcataccctgactgtgtggatatagcgagctttctatatgcgccttgaatcatcacccaatcgcacggtcaaagagctttcccatctatatcgaagccgcgttgtatatgactggtctggccgcgctcgtggatgcctgtacgctcaacagctaaatgacaatccacgctcatttattcatcatctggcatgaatcgcgacgcgacgcgctcgagcgatcaagagctagtcaacgtagatcgaccttgagtcagaaacacaattagacccgagtagcatgcaaaacaaaaagaaggtaacggctgtaaagccttacacagcgtgcatagccgtcattaatatcgccaccaatttttgcatcgagacgatcaccaggcagcaaaggctctagctcaatgggatcggaaaccggtcagatgggacgagaacggggagctgtcgaggtggctcatgaaaacacgatcacttcgaaaaacaaagatgctgaatcttacgagatgccgtggtatgtccctgttgattggaatatttcgtctcaaactgttctgggcattgaccacaaaacgctcacatcgtcgacaagggttgagaagtaccgaccgatcgtcttagacgatgtcgttggcaattcagaaacagtggagaggctgaaggtgattgcagaggacggtaacatgccgcatataatcatctcggtatgtggacgagacagcggtcaggactaccggactgctagcttgtgacaatagctgattgagtctctcacgacagggcatgcccggaatcggcaagacgacctccattcactgtctggcccatgcgttgcttggcgatgcttacaaagaaggagtgcttgaattaaatgcaagtgatgaaaggtcagtctcaccgttcgagattctgaatatggcgatcctgaggtgaatcacacagaggaatagacgtggtcagaaacaaaatcaagagtttcgctcaacggaaggtgactttgccggctggaaggcacaagatcattatcctagatgaagccgactcgtaagttctcctcgtatatttattatcagtcactttatgtgactaaagctggtctgtcctttcatgcatgccaggatgacgacaggcgcccaacaagctctccgtagaaccatggagatttacagcaatacgactcgcttcgctttggcatgcaacatgtcgaacaagatcatcgagcctattcagagtcgttgcgctctgcttcgatatgcaaagcttaaagacacggaagtcctgaagaggcttttagaggtatgcaaagcggaaagcgtaagtgtcgacctcgagaaactgcgatggatctattccggccaagctcatctccgctgacctcgcgaacaggttccgtgttcagacgaggggatatccgcactgatcttcacgtctgaaggggacatgagacaagccatcaacaacctacaatcgacgtactccggtttcaactttatctcgccggacaacgttttcaaagtgtgcgatcagccccatcccgtactggtgcagaaaatgatgaaagagtgtcaaaatcaaaaggtagatgacgcgttggacgggttgagagatctttgggatcagggctacagcgctgtagatatcgtggtaaccatcttccgcgtcgtcaaaacaatggactcgtgagtagtactttttctgatggattggttttgaatacataagctgaatacacgagcctcggttctttgcccggttcccttcacagcttacctgaatacttgaagctagagttcatacgtgtatgttgaaagcggctgatgggagcatttcggaatcctttctgacccgctcttactgataggagatcggctggactcatatgcggattctagaaggggtcggaaccttagtacagctcggaggcttgatagcccgactgtgtcgtatctccatcgacccaaagattctcgtattatgaaaccgtacacgcacacgcagaattcgcgtagcgaaatgcatgttgtataactggagacgacttccctacacaacaatgttttatatattacgtttatcctagagtaaggggtctttgcaggagtaaccgtcccgcgtcactgtcaaatctgccttctgatgtctgactttgtgccaatccttccagggacctctggattccatccaggaagagaccagttgccagtgagagctaccttttctaccctcttcctcttccttcccacaggcctctttatacgcagcccgcagcgattggcgacaaatccgactcgtcctttcgaaatcacctgttgttttcgacctcttcgtcccgcttgggacaccggcaggaccgaacacttcgacgctctgacctgccctccagctgcagctcagagcgaacgaggagacaggtggccgcggaaatagggtctctcgcacgattggcagcggtaaagtgcgaagtttcgcttgttccgacatggacaatgtgtcgaataccagggcaggcccttgagcgagtccctcttgcccacaagctagagcagtgacggatgatcgagaatgcgcaaatctccaggtcgtgccgtagatgcgaaagtcccgaacgacatctctgagagtatcacggaatagcgagacggccggaccatcttcttgagcgaagacctgttcgaggccgtctatcatcctagcatacgtgtagtcttcccgcggatcggttctcgtctggacagtgcctccaaagaccattcgcaagccttgaccatcgaaaaagtcctcgcccactattaagccattgatacgaataggtgcccagcccatcttgtcgaacaatgcactcaatcgtccgccctggtagccaagcatttgatagcgtgacaatttgtccgaacacgaatagcatgttgtgggaaaagcgtcgcctcgagatggcttcttcaccaaggggggaacggctatttggcgtaggctacgaaacgtggagctgccagtcgggacagaaaatgtcccgttcttcaacaatcgtttcatgacctcgtcctccttatccaaacggtccagctgtgcgatattggatgcagcgccacatggcatatgactggtgtatagatataggtccgaccgcctcaatacgaggctttgcaaaatatccattgaaaaggtctcggaggcagatagcgctatgtctagtccctcagctaggcctatggctttgaaaccctcgagtaacagaccttccaattctcgccgagccagtatctctgcgtgcatatcgacgacctgttgctcgcgctgaactgggatagagacacacttgttacccagaccaaatgttagaatcttcacagtgccagcagtgtcgtcggcttctggaggtgtgtaggcaagaaatgctgcgagaatcgtccattgggacgcttgaggacgaccgccacgaacctgaagcgagatgaagtagtcgcaaacatatcgggcggtacgatcggcaaagtccgcgtcgtcaatcgagatgcgcaatggtggaggcgactcttgaatgggtctgggcatttatcgcacggtatcaggaattcatcgagttgcgagttggagtgacagctggaatgagaatagactgataagactttggtgagtattcgttgttgaattgtaaaaggactgaaacgtggacgaactactagctactagtaggtatcgacgacggtaccgtaccattactgagtgatggatcatctgataaggcatatcacgtgataggtggcttctggtgagctacgtccatttacgtcactttacgtcactttacacgtcatggcctcatcctcacccaagattactcgggggcttggctgttggacggccggatgagttgcatatacttgagcaagtcttctgtgttattccgcgattcatgcattcttcagaatgatcgattatgatcatgacacacacagccatccggtcactagatcactagtgctagcagtcaacactgcaagacatatctcagtcaagttatcccgatcgcatccaatcaagcaaatccgcacaattaacgactctcgttcaagtcggactacgatcgctgcgaaagagcatcacagcagtgatcacggtcactcttcctcttgcttttcgtacaagcaagtcatcgacatcacagcacatggaagaagcttaaaatcgacatgcaggctcgccaagctcaagtcgatccagtcagcaccatctgggctggactggtcgatggcaccgcaactacactccggccatcgcgatttttccgcccgagatccgacttcgttggtaatatcggtgacaataggggaaggactgctgcggcttcctttgaagaagtcgcggtagatagggattcgtttgtgccagttcattcaactcaacaacaaagagcagcctccgtggtgctcggacagcaggaagcgaagccccttgctgtcgctataccgatttcgaacgaagtcaagccctggacagaacagggtctgattccgactcagccagatactcctgccgttggatctacttccgcagggcaatgctctacaagcacttctatcgattcgcctgggatggctcacgacccagagatcgtccagatgaatattaagcacccagaaattgcagcccatcaggtcaccatcctgcctacggacggggtcgtcgtttgcaacgaaaaattgcatcgggtcggctcattactggatagtggacacactctggcggcccatcttggtctgtttgaaggggtgcccgactacacgcctgactcgctggcagtggagggtatgaaacccgaggagaaacgagcctggtcctggtggtccagactcgaagcctcagaggctggttccggttcgaggcagctaccatcattggacatcgatcgagaccgggctccagtcccctctactgcttcaggaaataagagcagcgtcgcccaaaagacgcctgctctcgagctactgtatggcttgccgccgggcactctgtctgcggaacatgttgctttcttcttaaggcccagtaatgccgctgctattgtgagattaaaacctgtctcagatgcgagccttggtgaccgtcggagcgctaacaagacggctcgcattattgatacatttccagccaatcctgacagctgcacttcgagtcatcaagtcccgacagcattgctcgtccgcggccggtctcggtgccctttacgttgaccctcgtctgaagatcgaaatcgaggctctacaagctttccgacagcagttgaagttggttcatgcgactctcctcgtacgtgacggcgtcgggataagttccgccggcccattcatcgaaagactgcaatcgaggatcgactttctcaaacgagctattcaacctctgaagcaaaaagacatcatcaaaaagcaagccagccaactgcgcaaacaagtctggcaggcgtaacataaacgacagactagtaccgcctactctctttacgacacgatgacgaaccttttccttcgataacgacaatggtaacaccgcccgcgaagggaactttgagactaggcgaccggtgtagcttgaattattcctgtggttgcgtgagagagggtttctgggcgtctctcatgatttatccgtcggcgcctgaaggaacaagttgacaacacgacgcccaacgatattgtagtgtggatttcatagataccggtacaacgatgcacacatacgcctggatctatgcgaccatagcccagagagtgaacataaatctatactcaatggtgctcgtgggcctgctcaaatcggacgccgctgtaggaaggagcggagtctcatttcagtaatctttcgagggggcctttgatatgtctctaggaccgagaaatggtcgatgcgagagaaagactcaccagtatccacaggccttgggtccgggcttgtccaggttgataaagatcttgggatgaccgagagcacctccacctgttacgttcgagttgaattgaacttcagccagaggctttcgcaggtcagagaacatagcttttagacttaccaccgtcacaggtcgcctttcgtcctggtacgagacggacaggatcctcggcaaccatggccatggcggagatgggttgaggctgcagggagaagttgacctgctcgaagcgaggtccagagaaagcgtgcttcttcgggttctggctggtgctccacgtcgagggatggttgggggcttggtatacgttctgaggatccgcctcagaagggttggccgaggcaataggagagccaggcttgggagtatgagcagctccggttacaccaggggctgttggggcgttcgagtaagtgcgaccgaccaacagagatcgactcagagaggatgattgtcgacgcaaagggaacatgatcggagtgcttccagtttgtattggttcgcggagaataacaataatatctgctctaggccgtgaatgaaacaccagcttaccgcctcgatcagacatggctatagcagcttgtctagctttcaggaggtgtacgattggcgcgaggctaggctcatgggtgggttaggatgaaggagacggacatggtcgttcgagagatgatttcaaaaaataaagacatgtccgcgcgacaacccaccttcccttcccttgcccctgctctccccttcgcccatccctctcttccaacaaccaaaatcccatgtttcaaaacggtcgtctctgtcttgtctttatgttattgcggcgatcaccttggatatgtctacgagtctcgcttggaagaacggcagcatccaatcgtcctcagtcttgcctttaccgtctgttacgcgtggcatcgtatgtgatggtcgtccatggcctttggatcatcaataaggctggaggcttggtgttccaacgcaactatgcaggtacggaaatgttgaatctgcccgggtccccgcattcacttccgtcgacgccaacccattgacccgccgtcatctgtgtattcgtaacccgacattagaaggactttcttccctgacggccaacgaatacctcgtcctggccggcactttacacggagtgcacgccatcacttcgaaattatcgccgacagggaaagggtctggcgttcaagtcatcgaaggagaagactttaagctcaacatcatgttgactcttactggcaagtgatggttgggacactccgcaggcaaacaaaacctgatctacatcacctgtctttcttgttgcggtcgtaggcactaaatttgtgctcatcacgtctttaccccatccgaaccctgaatctacgcttcaaaaagtgtacgaagcctgtgagttgacatcatccatcaatccgtctacgtccttcaatattccctatttctgaccgttattgtgtcatgatgcccgataccagattccgatgctgtcatgaagaaccctttttataccctcgaaatgcccattaacgtcaacggtttcgacgaaagggtccgaacaatcattgccagtacgataggatgacgttttgaacttcgccaaagcagaaatatcctcgcatcaccacgaattcgcattatggttcttgctgtcttcaacatgaagcatgctggacgaataacatttcccctctaagcgtcattatcttaccatggtcccgcgccatcttggctttagcagcagggtcctacgtgtattctgggctcgtctgccgaagaaccttctgcgacctttgtcgccgcttgtctcgaaagataacgacagccacgaccatcgtcccccccaccaatccttccggttgtactttctgttttcccggggatgtccgacgaccgtgtcgcccggcgattgccacgtcagctacgaggcgagaccgggtgttatacgctgctcggttacttaattacttatgcacctctcctagacttgatgttgttctgctctgcgcagatgcaattgtacagcttgatcgagtgatcagattatcgtcgccaatagcttatcaccgataacagacatgtctactactattcacaacacaaaccagggcgagtgatcgacagacgagagagcgctctgaaatgtgcagttgctgattgggtcttcgaacgccagcttgttgctcgatacctccggtcctatccgattacaagtcgaagggatcgtatgaaaagattggagcattcgataaagcctacatcgttggcgattccaagactcatgcgttgatgtgagtcacgtaccattaccttcgccgagagattagctatctgactgatctggtttggattgctactcccgtcctacctctcagttgcgtctgtaagtctctcatagctatgattctatctcttaccttgtgttaccttgtgttgatatctttatgcattaaattcagatgatatctttggattcttccctcaaacggaacaaggagccgatttgctttcccacgcattgtccggtacaaaagttatcatgcccgacttcttccgtggcaagccctggccggtagatgacttccctccaaaatcggacgagagcaaacaaaagctacaagacttttttggcagcacgtaggtgtaggacttcggctctcctaagccttactactattcgagctcaagagttgcgagatcgtagggccaacgtgggggatcgcctttccgagctcaaggcggtcgctaccggcttgaaagatgttggttacacgcacatcagtctgtacggattctgctggggaggtaaggtcgcgacagcggctgccggtgcaaccgaccttttcaaaagtgtcgccatcgtccatcccgccatgctcgacgtccaggatgtagacgctgttggcgtccccttcggcttctatccttcaaaggtaagcgggatgctcgcataagacaaatgcgctgcctgccgatgatggtcctcttcatataggacgagcctagcgacaccgtgaagtctttccaagaagcgctcaataagaaatcctttgcgagtcagaacgattacaagctctacgatgatatgtaggtttcccacgcgtgtattcgcctatgagttgttgagtgagacttactgaagccctggtaccgctctgggggacaggcatcacggatgggctgctgctcgagctgacctcaacaacgccgcgaacaaggcagctttcgaagatgtctacggccgtctcgccaagctattcgagtctaacaaccagtagtcgtagccttctgatgagctgctgatattttggccgaagcctgtacaactttctgactggcatatatcatcgtcgtgttgggcgctgagcgaatgaggaatacttattgctaataattgctagtagaccaccaccagccaccaggcgaccaacatcaatgaggtcccgatcacgcgcttcggtcgcttccggttcatcatcatcatcatggatgcagccctctgtcaacccatcggccgcccccccccctatcttacggtctttatacctttaacatccacattcccagattctccggggcaaccgcacttgcgtacctgtcgacgtccagaccttgtatctacacattatattcagcaagtatggctgaggagccgcatatcgtccgacgagcaaagtctaccgggttcgcgaacccgcctgtaagaccagctcgaggcggaacttggcagggacattcacctgcgattaagaaggacaaccctacaaagcctctcatcaactggttggcaaggaaactggggcagaacaggggtgcgaggagcaaagttgccgaaccacatgtagctacgagccattccagttcagcagatggtccaaggagtatccttgcccgtggccttcaaaccccaccgtcgattcccctaccccgagcgaggcaacggtctacagtcgcaaccccctccattcgcctttctacccatcgaccgggttctacaaagacacgcaatagcgggcgatcttaccagccatcctcgattttctctcccgccagaaatcgggcaggtccaagagcctccttcatcacccgctcttccgcttctcctacgcactcgccttccttgtcgccttcatcgtcattacggagcctagcatcgtcatacctcgcactggaagatccggacgcccgatcctacgtcgccacattggatctccctgacgagaacgcctcgacccaacccatcccaccctcgagaccccattcgccggcgctctcggctgccaactccttgccctcttcggtccatttccaggccgatcttcatcgaggtatgctgcatgcaagctcactctgcagtcagtcctttggaaagcgctcgagatccgcctcccaagcgacgtcgatctcgtcctttgggtctccgggcaagacggttcgctcaacgcctagtctggtcagcactaaacccacaaccatctttagtaccgagagcgatattgctcttggtctcggcctgcctttcgcccagattgctgtcccacctcgccccatggcttactcacagcagatcgatgacctggtccgaagctcggaacctgcaggagaagatcaaagtgtcgctctccgagatacgtcgcagttagcggaacctcttgcctggacttcgttgtcagcattgttgccgggaacgcactccatccgtccgctcaataacagcaacttctcggctagcgtatctgagccttcatcgccagacgcctctcgatcggctgtgcaggtgccgggatattcataccattatcctcagcacaatccaccgcccaactcgatcccgcatcgcgatgctagcacacacacgttagccagctcgacgtttgccctgtctaccgtagcccatatggaagatgccgccaatcacgagccggtagacgccggttcgatcgcagccaagttcgaccggaatactggcatccaagaaggacaccttgaaactaggtataaccccaaactttatcagagcgaggatgcgaatcgaaccgtcggcacgtcgggaacgcgagcacttacgtccaccgcggtctcgccccatctcgaccctgtccatacccacgaaggcgatcagcccgatcccgaaatgacattccgattaaacgaatacgaaacacttcctagatcggcttccggagcatgccacgaagcggccagagcggattcggaatacgcgcgtatcctgcatgctgcatctggcgacagtgcgagcctgatcggcctccgtggcaggagagtttcccgagatagcgataccagcgatgcgagtcgtttctcctgggctgcagcctcgatgcgtgctaatccaggggaagcagggcagatgagtaacatgtctagtagaccatcatctaccaacagcaacgtcctggtacggcccatattaggacgacgtgttgagatataggatctgtataggcagacggcgtcttgtcacattgtgtgtcgagacatcgtaaatcacatgtcacattcatataattttcactagacgaagcgagagatatcattgctttttgtcgatcgagatctgtctacaactcgtctcggaccctatcctcggtgggactctcatcccagatcacttcgtgttgccccgattcgaactccgctgcctcttcctctagtggtgtcgctgcggactgatcgggggtcttagtggtaggcgcatccgattcgccgtgctcgaagtcgtccgcagcgacctcgagcggtaaggtcgccgactggtcatccttgcgttgttctagttcgatggtttgctccggacctgtggttgtgctgaccgcatcaggaatactcgtttgtcctggttgcatgggaaccgcgggatccgctgccgtctggtcgggcgagggtcttgactcggctccggaccttgcgctctgagccacgccgggctgggcggcaggtgttactttactaatcacctgagggccagagtcctcttgcgcgtcgtcgtcatcggtaacacggtcttgctcctcgaatatctgagcaaggcggtcttgctcgcgtttctcgcgacgaatgcgatcgcggcgctcctcctcctcccatttcgccctctgctctctcagcttcgcggctttatcctcagtaggagcaggggcagcggtttctgggaccgtcgtagtaatgatggtggtttcaaacatggtgacagattcatcatcgtttccgccacggatctcccctcgggaaactgattgaagatatgccaacagaggctcgaacttgagcggtccagctgccaaggttgaaatacgacattggaataagacgggttcggagaagctgttgcgactggggtcttaccggtatagacatcctgttcaccttcactggtccaggtgacgaccttgacgccgtcggtctttttgtccttggtgctaataccaagcgcatctttggcttccgctctttcgtccttgatgaatccgaagtgtatcttctccgataagcggtccgaaagaactttccacattagaggaagagaaggattggaaggatgaatcaatagggcgtgggcctggtcgggtttctgctcgtggtggaatgaagtcgagtctgtaaaccaaatcaattcgccacagccgatttagaagagaaactctcaccgctgacttccaagcgctgatttcagaaggctgcctcagcttcttgactttagtggatggaatctgatcagaggcccattcgatgatgggtcccgctttcctctcgcgctcaaatgtcctgccccggccttttcctgactttgtataagcctgctcaacaaagagacagtaaacatggcgttgtcgcataggccataaattttcataatgcagctgaccttgattgtaggaaaccccttgacatcctcagccgcgcatagagctttattctcctgctcatcacagtcgatattgtaaaaaggaatgagtgggttcaaagattctgccgccttttggtattctggggccaggctgtacgtcggtagaagtcgatgttatcgaaagtggcagatatgattccggctgcatacttaccttttgcagtggccgcactatgaccccattgatgtattctactgagcaatcatctcgttctactcggcggataccgatagactcacccacggggcggtgaaagccacgatctacgtgagtaaacatccaaaacatcagtcttcaaggcggtgaagctatattcgctgacaataagccttacagcaagattctatgtagggcaagcagagagcgcatgtcaaaaagtcggcccacggctggtcaatcaagcgtgaccgggggggactatccagtatgatatccactcacgccgtctttcaatttcccgctccatgacttcttcgataaaggtatgacggctcccttggctggaaagatggccgcattcgctgtatgcaagactgccgtgcccaaaagcgcgatcagcaggcagctcatcgcaaaagctcgagccatgtccggttcgaaagcgtgtaagaaagctctttacaaccaatcagttggcttgattgagcttttggaattgttggcgatagagtagctagagcatatgggatgagtagtattagggtagtagtagtagttaattagttagcagttagtgtgatcgtgacgagccacgtcatcaaccatcaaccgcaactcggtcgatgggcccgtccatcattcctcaccacctgggtggaagccggaagcgaatcaacatccgaagtccctcgtccctcccctcgccttcctgcccttttgttttgtttttgtctaaaggagctttttggacgtcgtttcagaatttcaggtgggtttttgatgatgatgatgatgatgatgatgatgatgatgatgatcaagacagttgtggatggcatgacctgtggtataaggtagccatgtagccacggaggaatgagcaacatgcacatacatactcaatactttaattcacaaacgttaatacacctccattggaatacgttttactgactgctgaccagtcggactttctggatatcatcctcttgcatccgccatcaaggttgtcccggccctgcatctggaccgatccccgtgccaatccgactcatccgtcatgaaaatgacaaagtcccgttgggatcctttcttgtctggatcctcgaccatcaactcggaagaggtgcgaaacctctcaaatcaatccccgtcgcggttaagtcttattcgcccgttcccatcacagccgtccatcaccaagacaagaatatccttcttgtctttcgccgtgagcctcactacctcttccctgcgattcttgtatccatcgattgtgtgaactgaatctgacacacgatcttagttgctactaagcttcatcgaaatatgctgtgtcgcaagtttggccgccttccagtccaagtgggaaatcggtgtctgtgagagactgaataccgctccattccccctctgccctctgagctgaatccactcactcatgtgccttgccagctggtctcaacggcttcctcctgtttctgttgttccttatacttgctttggccggattcctactcttggtaccgctagtgttcgacaagtgggacaagtttccgactctgaatcgatggatcaacgtgccccgctcgacatggatatttctcatcaccgggaccggcataactctactgaccgcgttgatgatcactatcagtggtaagcatcccgcatcagcccattcacaatgacacacctcaggccaattgggtgacatcttcggtaaacatagccttcactcaacccggctgcaagactccagacgatgacccccatgccgataaaggcgacgacttcaagaacggtctgggcagatggtgctctacgaagaaggcttcagcagtgttttcatggtaagtcgtatgcacaaaccttactttctcggttctaatgacttcttatgcgacaggttgctgctgggtaggtccgaaattgatctcttactactacaaacaacgatgctaatagttcggcgcgtttcaggtgtgtggatcgcttgtctcattcactacctcatcttggagcgccggaaactcaacgagaacagctcctcgctcactcgcttcaagtctacgtccatcttgaacaactggaaggcgatatcatctgacgatgtcatgtctgagcgtctcgtttctggacgcaaggaggccgaaatcgagagacgcccggagctctctcccaagaagcccagtttctcagtgctagggcaaaatgaacgagaggcgggctatacgtatgggtactcagaacatttggatcgcgatggagagattgacattgcagctggagacctcggctacccatcaacacgtggggtccacttcgtcccgcaatccggagggcggccaagcatcgatccatatggcgctttcgacggagacgggatgccaggtgccggcactcccaagctgaacattacgccccttaacgcagagatggcaggcagggatgcgggcggcatcggcgggaagccgggactcattagtcgcactatgctgttggcgagcagtaacgcgacatgcgacgatccttgtaagggcaggcttccaaagaacagaataatcacttgatctcgttcctcaatcgcatttgttcactgccacagataccagggtccgcgaatgattgtctggatcttcccaggtgactcactcacccgcaagatacagctacatgccggctcatcgcagcgatgtatggggtagtatagattcataccttctgaagatatggacagggagacagagcatacattcttgcttgtagaaggatcattttcgtggtgacgttgtttggcattgtgttccaaacgctttctgcaatacatttgctccgggaaggggtggtggagaaccttgtatgtttgcattcgacatgatgtaaaagcgatgtatgtgtattggagacccgtctttgctcgaaatctttactttccaagcttctttctctcggcccgtgtagcctttctcctcttcttgtacctgtttgaaatttgtcgctaccacttagcattgcaatggattccatgctagacgtcgtgcttacttgtgcttggaaatcttcttcttccttttcctcttaacgctgtccatccacacgaaatcccctacagcgccttcgtcttcgaccatgaatttgacccgggtcaaccgcgaagacgagccagcccatcttccaaaagtcaaaccccgctgcaaatgggcggacctcacgtgaggggcaatatccgagggtcgcatgaaggctgtcccagatggagacgagactatgttgttgctaagagacgcagcggcggcatccgcaacggcgaggcggtcaagcagggcctctacctcgctcactgcaagatccatctctgccttgttcttgcctgcttccaacctgacagcttcctcgtggagcatcaacgccgagtgtggatcttcgggtataaagctagtcgtcttggatcgtgatgtagccgaggaggagggagatagtcgtctctgagccgcttccattagggacaggacattattgaactgtatgtcactcgaggaagggtgggggaggagtgcagtgacgagcgcgttggcgggatcctcagaggacttgaagctgggtgataccgaacgcgcgagtccgctcgtggatcgatgggcatcgaaagacccagaccaagtctgatgctcgttgaggactcgcgaaaacccttccctttcgcaaagtaacttggcgatgtgaccgtttacgaggtcgagctctctcagctggttttccttacgagcggtgtcgcctttctcaaagaacagatccggcctcacggccgacggatacgccagcaggtctttgagagtgtaatgtgtagcgggcattgtgaagacgttgggatcggtctccagatgactggttccaaggttcaactttaagggcatatgagacggcgtgagggccatgtgaatttgagcctgtttcgggtgaaccgggataggtctgaaggccaccttgtcatggcgcatgatgtgtaatgcggcggaagatgtgaaccgcttgtttcccgcatcccgatctcttcgttgtgacggcgagctcttcttggctctaccgtgacctccggttctaagctctctgctttcctgttcacatcgacgaggttgctcttggtcgatttgtgcaggaggagcgcaggacgacgagtaacaggcaagctgtttgcccattacgaaccgggtgttggctgacccaggtatccggagtaacgaactcatgatacagggttatcgatacctcgagtatgtactgttgtgcctcgatggacttggtactgactgattgactcgaaatatgcatacaggttatctgtgcgagcacgatgatgccatgttgatagatgatagaaaaggttcaggttgatcggatgtgaccctgacctgaccccgctgctcaactttcagtctcccttctcacgcgcccgcgagttgctacgtaacaacttagctagctagcagcgtaccaccgcctacaccggtctacaccacagtctgtctgtccagtgtacgtagtagtacagcaaccagcaacaaagcaggtcgacgacttgccccgaacacaccctccgtttacaaccatcactcataacaattacgtgctcattccaagtcaaagcgcattatcttacgatacgtgaacttactgtcttctagcttctagtcgactacgccccgttccgtttcgtcgatatagatcgccaactcagccacaccagctgccatcgaagctcctgatccaatctcctcgcaatctcttgctcaacatgtcgatggacagggatctcattgcgctggtcaacaagcttcagcaagtttcgatgcccagccttgaaatttccaaggggagaagctgcatactgatccgcgaaattgcaaattcgcagagatactttcaatgctatcgggggcgatgctgttgatttgtgcgttatgttcgcagtgttggtatctcggaataacaagctgaatacgaatcgttccaattttcaggcctcagatcgttgtggtatgtcactaggtctccctgtcagatggccatctgtaaaacacctgagctctggctaagtcgaccgtccgtacaggttggttctcaatcggcaggaaagtcgtctgtgttagaaacgtgagtttgatcggcaagggacacataagctacagtttcagagctgatctggcatcctctgtagaatcgttggacgtgattttctgccgagaggttagtagactgaatcctgatggtagtattctgggtgtcctaaaccacacaacgtggaactataggaaatgggattatcactcggagaccgctcattctccagcttatccacaccccgaaccccgctgcgacgaagagccaggatggctccgagagctgtgagcataaacgtgtaacagtctctcgtatcgacatcccagcttatcgccaaactctgcttgtctacttagctttacctcacccttccccgccaatgactgagtatgccgaatttctacacttgaacagaagattcacagactttgaggagattcgacgagaaatcgaagcagagacattccgagttgccggtcaaaacaaagtgagtgctatttttcttttatggagccgatagctggactaatggctcgtgactcctgtgacgatgttcttctccgccagggaatctccaagctgcccatcaatctgaagatttatgggcctggtgtcttgaacctgactctagtggatctgcccggactcaccaaagttccggtcggagatcaaccgaccgacattgagcgacagatcaagaatctgatcgtggattatgtgtcgaagccgaactcgtaaattgctctagcgattattgcttgacaactgtcacatcgggctgacttcgaaatgcgttcgttttgcatagcgtcatcttggctgtatctccggcgaatgtagacatcgctaattccgactcattaaaattggcgcgatccgtcgaccctcggggactacgtaccatcggtgtgctgacgaagctggacttgatggatgccgggaccaatgctttggatatcctcaccggacgtacctatcctctcaaattgggattcattggggtggtgaacagaagccagcaggacataaacgctggctatcctatggaagatgccttgagaaaagaggaagagttttttgccagacatcctgcctatcggaatctcgcccatcgctgtggtaccaaatacctagccagaacactcaaccacgtaagcactgctggcgatctattcgcagatatcgtcgttgacagccgggcttcgttataggtgctcatgaaccacattcgggacaaattgcctgacatgaaagccaggctcaacactttgatgggccagacacagcaagagttgaatacgttcggagattcaacattcctaggcgagcagcacagagtcagttggtaacgttctgtatgtcgatgtatctgaactgaagtccgccaaattacgttccataggggtccttgatcttaaagctgatgacagaattcgcacgcgacttcgtatcatccatcgagggaacatcgctcgagatttctacgaaagaactctgcggaggtgctcgtatatactacatcttcaacgatgtcttcggtcaagctctagaatcgatcgacccgacccacaatctgacgacgcaagacattcgcacggccattcgcaactctacagggcctcggcctagtctcttcgttcccgaagtcgcttttgacttgctcgtcaagccccaaatcaagctactcgaagcgcctagcttgagatgcgtcgaattagtctacgaagaactaatgaagatttgccacaactgtaccggtgctgtaagtctacacataagtgttgcctcgtgactcggaagctaacttggttggtacacgttctgcagcaagagctcgcacgcttccctcacatgcacgcacagctcgttgaagctgtctcagaattgctgcgtgagagattgggccctacgagcgaatatgtcagtagcctcatcggcattcaggctgcctacatcaacacgaatcaccccgagtttgtggccggctcggcagccattgcacggggagagtttcctcctggtcaagcggtccctaccataaacaaggtgcgtttaccctatgatatgttgccaagctgactttgctgactatgatcttcacgtagccccaatctgaaaaatcgcaaaacgaggatgacgtctctgactcggaacccgatgaagaggtgcagcccatgaacggcagcggaacgcgaggcaccatgaaatctcgcaccgtatcgcagtctcagcatgacagccggaatagaccgcacaccatcgctcctacacccaagcacttcaatgaactcaaaggggaaggcaagcaccctcgttccgcatcgacttccgcgtcaatgactggcgcgacgaccgcgatgctcaatatgagccatgcgcatcaaagtagcacctcgccaaacaccgctcgcgagacattcttgaattactttttcggaggagttggtcctgccggtcaagctggaccgagcagtcacggcggcattcaacagaagggtcccgcaggaggagctcgtgacttgttgccagatctcggtcaccgtcgatctcagaacaccggggataggctggaagctggtccggcgtatgacatgaagagcctgggcaagcaccttgaagctgtaagtcagacaaagcgccccggtttctttcttgtcttggcgattgtcctattgacacagctcctcgcagtccgctccggatcacggtcacaatctgacaccacgagaggagatggaaacgacactcatccgctccttgatcgcttcttatttcaatatcatccgccggatgatccaagatctcgtgcccaaggcgatcatgcatctactggtcaacttttctcgagatgtcgtgcagcagcgacttgtcactaacctctacaagccagaccttttcggtgaattgctgtacgaggacgaggccttagttactgagcgaaccaggatcaagacgcttctggacgcttatagggaagctttcaagtgagcgggtctcgttgtgtctcgcatttgcatagccgcttgggagccatccgactgatgaaatcaatcgatctttcagggtcctctccgaggtatcgctcaaatccacgtaaaagcgagcattctagaccacttcaagcagcaacgacgactgtacgactcggcagtcttacaaacgccgttttctcctcaccactgtgtcgctaccctgttatcacccgtttatttgttcagcagacacgaggcccctcgtacttcagaatgatgtgctatgatgtgcttaaacttccatgatttctgaacattgtaaggtcatacacgtacacgagtccgactagcttccgagggagtcgaggcaagacaacattcctttcgcaagtttgactgtggcttgtggctaacaataaaaaaatcgccgatcaccaggaatcgcgaggggtgtacacgcggtagtttggctcggggggtttcgatcggtaatcggcgactctctttcccgtcaagccgaaaagcgagaatgcaaaggcagatctcaccggttattccgtagatgtcgcattgtcttgacctttgaaatcgatcggttcagccagccagctctgtgtggagccgcatactatagggtgggcgcaggatctaattgcaaaagcgctgtactgctcgaatccagaagatgcgtagactcaacagatttgtagacttcacaccggcgattctgttgggtagtgccgtgagctagcgtggtttgcggactccgtacggcacggcgtccagagaggagaaatagcactcgggatcatgaactgcggtcactttcggaggctcactttccgatggagcagccatcgttgcggtgaccgaatgctttcttgtatataagtaacaacacgacattgacctcgcgtgctcgcaataatgtccttccaggacttatacagttttcagtgcccatctgtgcacctaaaaagagatctattctggtgtctcaacgaattcctcgtcgtttacctcggcgttttggcatggcgaaccccccgtcagagtctgaggccaaggtcggaccccgatctcgcatggatggtacatcgtcgccacaagtcggtcgctcgacttccctccgcttgacgcgaacccagagtgattatgctcaaacatctttggctcggatggcgagtctagaaacagcccacctcacctgccatccaaaagataatccggaggaggccgatacgtggtcagacgacaagcatgagcggctcgaccgatgcaccgatcttgagaccggccacaatgtcagcgtgctgaacgtcggaggtcgtagtcaatcgattcgcgtggcagccgaacattcagccataggtttcgaggatgtggggagcagggagggaacggatttgaacggtcaacttaggcgtcatgacagcaccggaacggaagttgcggtgggtgcggagcacaatcaagccagtcctgagcttgtcaacaacactgcttctgaaacgccttccaagcgagaagggaccgggcttcaagatcaaaccaatttgttaccggcaaggcagatcatcctcgtttttctgggcctgagctgtgcccttttcgtctccttgctggatcaaaccatgtacgttgggatatcactttgtcgctggtacaaccaaatcgaaagcttacgtccgtgatgacttttctcagtgtcagcacggcattgccaacactcggcagggtcttctcacgcgctgaaatcagcagctgggtggccacgtcgtatctgtacgtgacaaacgttaccaatttgcgccgtgcatttgcatactgatccggctcgaggttgattgtttagtttgacgagcacagcagtccagcccatctactccaggctgtcggatatcttcggccgcaagatcttgctcgtcttttgtctgattttgttttccctaggatcactagcatgcgccttggcgcaaagtatgattcaacttatcgtgtttcgtgagtgataccaccgagactagggctggaagtgcaatctgaacttggcgtcgtgattgtgataggcgcaatcgcgggtctcggcggcgggggaatcctgacccttgtgatgattgtcgtcggtgatgttgtaactctgaaggagagaggtatgtcatcgttgcacaacgacacctagaattattttgagatcatcgttcctacaggcaaatatcaaggtattctgggtgccgtcgtcgcatttgcaaattctattggaccggttctgggtggattactcacggagaaagcaagctgcaagtaggctgtggtctccgtgacaattggcgctcgggaaagctgatctatcatccctcgctctatagggcggtggtgtttcgtgagtcggttgcagacaacacaatcatttgtttagcatgccaatgcgtcttgtcgcagtggatcaatctcccaatggcaggagttgcgatccttgtcgtagtcttcgctttgcccttgagatcggtaccaggcgacattccgagcaagctcaagaaggtagattattccggctgtgtattaacactcgctttcagcgttcttatcttgatggctctgagctggtaagccacggtacgagtttgcgtgtcgtctgtctgaacgccaacgtaaattcaaaccaccattttctaggggaggaactgagtatccatggggaagtgccgctgttcttgcgcctcttttggtaggactggcgcttctgggcctgttcatcttcgtcgagtggaaactggtacccctgcctctgtaagcaacggttctctgcaggcgtaaggagagttcttactcatccgttcctcataccagtattcctagtaagctgagatgaggcaagactatgatggtatattttttgtctgacttgaactgcccacacccatcctagtgcgcatcttcaggagcgcgacggtttccggtgctatggtggcgacatttctctctggcatggtgttctatgcacaactgttctatctcccgcaatactttcaggtagtccgaggtgaaagcgccattcggtccggtgtgctgctgctgccgctaattgtggtgcagacgatcacgtatgtcatgcctgaccttctttaagcaagagaaaaagctggctgaccttctggctcgtgctagctcattcacttcaggggtcattgtctccaaaactggcgattacagagtgagtaatgtgcgttgctcaactatgctgtgccgcaagctaaaacacttcgcgatatcgtttcaagatcaatctttatctaggtttcgcgatctggaccatcggaatcggactccttaccacgatcggtccagataccacaatcgcacagctttgcgggtatcagatactgagtgggataggaggcgggcagacgtttcagacgtcgttggtcggtgggtctcggaacgcgcgtctcggtccgttgagggacagataagatactaagctagatctcacccctagcgattcaagccgctgtcgatagatcggagatggcagtcgcgaccggtgctaggaacttcatccggatgcttgggggatccgtggctctcgcagcttccgcagctctgctcaacaacgccgtcaagtacgttacttcatgcagatttgacgctcccttccatcgcggctcaacgtcttttgtccgcaggaatgagctctaccgggacgacaatttcccaaacagtatggtacggcagatcgtctcggatccaacgcagatcaatgatttggtcttatcagccgagcagaagacgattgctttgcgtggttacagtcagtgctagagaagaacggatgcctcccgctacgagctaatcgacttcatctgcagcccaaggcattcggaatgtcttttaccttctattaccatgttgtgggatttcatttttcgtcatcatctttttcgtgaaacaccgtgagtggctgcattcgggccagttgatgcaaaattctgagggatcgacgtcaaatcagactcgttggagcgctcggatgacgctgccttgaagcaggagggtaaagatcggctcgagcagcggaaaaagcctgtatcgagtcaggttgcagatccgaacgaggtcgatcataccaaataggcaatgtaagggggtctttctcggttgtattcgccatcataggtaacttcaggcgatcggattatactacatgctaggacgcgcaggggtgacgaagtcagaggtgtacctctgtaaacagactctctaaactttgttgtaaggtttgcgtcgctgtagccaggtcatcttgcgttacccggtccagcaggagagccaaatgggctacaccgtcaagtctacttcggtatcgttcaaagtgcgccttgactttctttaaatccgacggtgaagttgagctgaagtattcggttccgaccatcggtccatcccgaaagacttgatggatgttgacttgcacaacgttctgtcgccgcagactatcgtccagaaaattttccgttgcgggcatctctatggggtaatctagtatgtaggaccatattgcttcgctcgtcagcattggctgcgaccctgaagggggatcggattcccgacaaggagcgttcaatatatcctgcagagccggcgaaatgggcgggtgatacagcaagtaatgacctgtgaacactgccgactctccttctacgtttccgatctcgtgaatgcagatgccttgcatccaatcgagcgcggccgttacatccggtagggcttctgttgattcttcctccagctgttgtaggtcggccttgactcgctcccaaacccgatccagccatgctgcggcaactttgccgtctccgtccttgtcccgaccatcgccccagcctacaagaacggcttctttgagatccgccgcgagacagagaacctcgaaaccaacgccttgcgtcctagcatcctgtcgagatagcttagggtaaagctcaagaaagtcgccgaggaggaagtctgcttcttttgtgatgaatagtgcgttgatgaggcggagcgacctttgtgaaagcgggcggaaagtcgcaggacgacgaggaccatatttgaccttgttcatagcgatctagagaggcaaactaatcaccaagcttggccaatctgatggccgctacacagaaccatatatgaggacgcaatgtttcatgaacgtcggaccgtttagacgatcgacatctcattcgtcgaattcgtcgtcttagcgatcgtgacaaactcgttttgacccctatctttccccgaaatttgcttccgaaacccgaaactcgcccgcgtcctctgactcgctcgagccaaaatccaggaggttacccaaagttgagatccatcattaattctaattatcatgtaccatcctgacggtcaacatatacctcgacctctgtcgccctccttcttgatcctaacgttatagtattgcgccgaatctatttgcctgaatccacctcaagaacagagatgcccttctctaccggctcgcaaggctcaacgcccacggcaccctcgcccgaacctttgttatcgaattcgtgcgacgatcaagttccctgggtcatccaaaagtatggtggcacctcggtcggcaaaagtttggcgagcattggagctatcgtcgagtatgtctccgtccaagcatggcctctacagcaaaggcgggcggctcaagctgacatcagcttgtcgaactgcccttagatcatatatccccaacagcaaggtcgctgtcgtctgctcggcccgctcgggaaccactaaggccctaggtaccaccaacttgcttctgcaggcttctcgtgaggccttgactccggccccaagcgcgggagtcgtcagcggctgtggcacagaacctccttccggaagtgcaacccctttttatcccaaaagagttgggtcgggatttttcagcaatggatcggggcctggcatgacgcccctcgagggagcatcgggaatgagcgctagcatctcttcgctgaaagacttgaagctgtcaagatcatcatccccatcccccttccaaccttccgttccttcgccgtcgtcttctggattcctgccaatctcgactcctggtatcaacggctactctaatacccacggacattcaggccaggaacttcctgccttccacgataccgtagaccagttgaagaaggatcacttggaagctgcgcgcaatgctgtcaaagatcaggccctcctgcaggaactgaacgaggaaatcgagcgagatctggatcgcctgagatcattcctgagtgccgctcaaatcatcgacgagatctctcccagaagccaggatagcatcattgggatcggggagcgacttgcgtgcaagattgtggctgcatcgttacgagatcgggtaagctgatgtgggttctcctcctctctccacctggctctcgctaacaagcttgcacattccaaagggtatcgattctgagctggtttccctggagaacatcgtcgacagcaccatcgcatctggcgaagaatcagctcaggcttccgcttctcatgatcagggcgtgggacaattggatcaatccttctacgaccgcctctcagctagactcggggagcgactccgagcttgtggtaaccgggtcccggtgattacaggatatttcggcgtcgttcctggctcgcttctgagtcagatcggtagaggttacaccgacttgtgcgctgctttatgtgcagtaggtgtgcaagctagcgagctccaggtctggaaggaggtcgacggcatctttacggccgatccgcgtaaagtccctaccgcccgactggtaccgatcattacgccggacgaagccgccgaattgacctactatggaagcgaggtcattcatccttttaccatggaacaagttatccgagccaaaattcctatcagaatcaagaacgttgagaaccctatcggcgaaggcaccatcatctacccggctcaaagcgaagacatggaggaaggcgcccctgggtcgtccgcccctggtgtcggtaatcaagacgtcaatgaggtcgtcaaaataatcgactctatcaagatgcccactgcagttacgatcaaagacgagatcattgtgatcaacattcattccaatcgaaagacgatcagccatgggttccttgcacgcatctttggcacactggacaagaccggcgttgtagtggatcttatcagtaccagcgaagttcatgtaggtctccgcatcacgaaagcaagcttgtcgagtcgcagctaaatcgcatatttctgattcaggtgtccatggctttgcaagacttcattaaaaaggaacgattggaccgcttggttcgcgacttggagaagatcggacacgtacgctgcactgagttgtgtttgtggctggatctgatcgtgactcaacaaacccatttgcgaccacagattactgtctcaaaggacatggcgattctgtcgctcgtcggacgacagatgcgtcacatggtcggcatcgccgggaaaatgttctcgactctggccgatggcaacgtcaatatcgaaatgatatcccaagggcgagtcaagtctggcctgcgaatcacactatgaggctgacgaatcaggctttaaacctgcagtgcgagcgaaatcaacatcagttgtggtaagttggtgagcgagaaaccgggtcgcatgcagatcgtctgacgtcgttccgtgcgtagtaatcaacggcaaagacggcgttaaagctctgaacctcatccatcaagcttgtttgacggtgccggtaactgcgggcaatggtggtaagtactatggcaagatggtggattcgcatgcaggactgctgatcgccacaccacccacccagccgtcacatattagacggcggaccatgacattacaattccctttccgcaactaacagcccacctgtatccaactacatccgcatcaacacctgaggacatgtacacagatgcctccaacggcactcaataggctaattatgccatcaatcacgacatcatgacatatgaatagattgcgatacgaccgaagctctcagaaaaatgcgtctgttaggccgtttccgtcagtcggggttcccgtggccgcatcgtatatccagacttaccgtaatgagcgagctgcgcgtacgtctcgctgcttaggcggtaacgcagcatgccagcaaacatcatgagagctctctcctgcctccgaagccgctgcatccgctatatcgaccattccgaacttgagatcagtattgcgcgaaggggatagtatatgtggttacgcgttgcttacctcctgccgatcgtctcccgcttgattcgctttgagtcgttggttcaattcaaatacggcattcatggtcattaccaagaccttatctatcttgcgcgtgatggtgtcgtcgacgtgcttgaagtcttctgcagcgcgagtgatgccaggcacatctctgtccaatggaatgagctgagtcgctagcacagcctgcgcgcacaaacaaatttcagtgaatgcctcaatgcgactgcttaggctgtaaactgactgccagagccttttcgaaatctgccttctcggtccagcccttcgcttcgcgcaatttctgtagctgattagctgcgatctgtcccgcgctgccaacctgcaccccttctcgccgcatttcatccaacttgaactggacgaatgccaacaaatcgtcttgcccctccgcttccgttgcaggtcccggttgatcgagcgagtcggagagctgcttgttgattgcagacatgatcctgtcatactgtccagccaatttgtaaagctcgatacgatcattgaggggcaagtcggaaggtgcggaagccgcaagacgagcgataaggtcccggacagcctcgtcaggatttcgaactttgacgagcttgacgtcacgcatgagcacgctgggctgtatccggtatcgaggtgtcaggataagtctggaaacgagaaacgaagacaaccgcttttcgcgaccaattacgtacgacgttttgaccatccgatgtcttttcgctaagcacaaggttatagcttcgtgtctccagaatcagagcttggatcatgtcccaacaagcctgtacttgttcttcgccaatcgaatctggcgcgtccgcattcagtgatagcaaatagacgtattgcaatgcggcaggcgggtcaatccggacgaagtttcggacgtagcgctggattaggcgagtaaagttacagtataccacctcacttccgccgagagggacacccgacgcggaaatgaaactgttggctgtcatcggcgtagaagccgccctgccagtgactattgaaaagaaacggcgatcagctgaagtttcaggcttgatagcccacacctacgcacaaatttcggtttcagattggttgcgggcacttgggacacgcagtaatccataataggtcaaagcgatggcgaaatggaccgcgtcgacttccatgctctcttcgtgaaggaacgcgatggcctgaagtagtaacgcagtcagcatggagttcgtttcaactttgaggtcagggttattcgcaccttttcaaactgggccgtcaaaagcaatctttggaaatagaccagaggtcggagcctgccttcggcgagatcgccctctccatacttgactaccagcgctccgagttctttgagcgaataaccagcatttttggcccccaaccccgacccaatgcttgggacctccctgacgagactgagctggaaccacatccagtcctcggtagtcacgataacgtgaggaatgttcttcttgtggatttcctggcgacccagaagtttatagacagcgtatttgaaagggtcacccttttcgaggttgtgcttgattcgagcattgaaatcggtttcaaatgcggtgcgcatctcagctggaagcctgtaatgggacaatggtctaggcgtgagcgaaaagaaaacaatcgctgtgtgcgtctcacaggggaatgacctacgtcctatctgcgctgttagcccatgccttgaagagacccgcaaagttccggtctttgcggggcatggcgtgctgcttctcctgtgcgagctcgagcgcctcgtctatgcgcccacctcgcatcaggtagaatacctcgacccagaagagggagtttgcaactttctgtcgagcacaattgaggcacaaaaggcgagtcagcctgaatgatcaagtgatgcctgtcgcgactcgtttgagctccctgccacatacctccaactgagcactgattgcgtggttaccaaatttccagccgacaaaagcagtgactttgcttcggaagcccggaactcctcctacttggatctctttgacgttgtccgtcaggaccttgttgacgtgcgtcgcgaaagccctctctagccatgcagttccgttcgagatcaactttgtcaacacatcgcaccgctcgcgagactgatcttcggccatgtaacccttggcgaaagctcgttctcccggggcggatccgtcggcgttttccatgagcagttgggaaagcagagtgtaggtagcgcttaggtccggaatcttttcagagttgaccttttccttcatctggctgacaatagggaatggtttcttctctttacgccgagcgttgagactcttgacgacgctgtcatattccatcattctcttttgcgcgttgacgatttcgagggtattggaagaactgccagttgtagtcgagctacccagtcgcgaccctccgatagtcgaagccgaaaagttgggccgagcaatagactggcaagcgaatgcatggcactaggtgagctcgctaggctagggactttgacaatgtagccttacctggccaaatcggcttctgcccgcattgctgtcaccgagcgccagctgggcaccgctcgtgctgcccacacccatctcttccagaatcttggcacgctgtgacttccactctcgatcacatcgatcgatccatctctcctcgctgtcacggacggctctccgaagggtgtcggagatggcagtgagaatgatcttctccttctgctgctgcaggaaagtcgggagcggtacgagaggcgcatcggggtaggactgagaggaaggcgcttggctctgtgctgtcgtcggtaatgtctgagagaattggttgatctgagatgtcaacgagggtgcgttaatcccatgagtcgcgagaaggtaagcactggtggtagcgcagtgcgtttagtaacgattagatctatgttgacgacaacccctgcttacgctccaccatcgacactcggcccgtttccaacgacattagtgctgcttcttagggatgaagctcctctctgagctgagagtccgatggcagatcgggccttggccaatttggcgcttccgctgagaacatcttctataccagagttcagctggggaatgccctccaatcgagatcctgggggaagcaggccataggattcgttggcaagtgcttgtagagaggccattatggaagaattgccttccgttgaatgatgactcgaaagagaacaatggaagaactctatgtctctgttcgttgaataggtatatggtcgtcatgattgcgaagcatacgagctgcacggcattcataatgctgaagttgagttgaccatggcgggtgtgcgggaccgagattgataggcaaaacgaatattcgtttcgagattaaacttccggaacgtgttgcctaggtcttccgcctacgctgaacttcatggtcgaaggctgggcgagcacgatcagccaaaagtagctcgatagtctcacataatatgatggcagaggcgagagtgtacgagtcgggatttgacgaattgtatggaatccatattgtcgcctgtacctgtatacctggctggccaccttgcccctttccatcattaaagtcgcgagtgtgtggacaatgatcgcgcgcgtcagagagtcgcgactggagtggttgaaggctaggggcgatggatcgaacgaaaccaatgccgaatgatgttgacatgtcatttcttccctacattcggctaccttgagcagtgtgtaccttgccagatctcagcagttctcaaactcgcgttcgtctctcgaatctccattgttcagtccctttccgacagccgcgctctgcccggtcctctcatccaaactcgtatccatccggacattgttgacactggacaactcgacgtctgtgattaccatttgcgtctgattaggccctgaatcgcgccgggggtacaactttccaacctggaacgagaggagcagctcgcaataggagttgaatcatcatgcacatcaagacgttgacgattcagggcaagtcgctaccgtgaaacagctcagaccggagagtgtcgactaaagcagcgaggtctctcttgctgacagggttcaagtcttatcgtgaccagatcacagtcgatcccttctctccgaagcacaatgtcgtcgtcgggcgtaacggatcgggcaaatccaacttcttcagtgcgatccgtttcgttctctcggacgcatatgaaaagctatctcgagaggaacgagcggggttgcttcatgaagggaccggtcgaagtcagattatgagcgcctacgtcgagatcgttttcgatagtgagtccatgagcagggtcatcttccgcctagaacgatactgaacagcgaatcgaattcaagactcggattctcgtttccctacttcgctttccaccctaacattacgccgaacaatcggtttgaagaaggacgaatacacgctcgacaaaaagtcggctaccaaagccgaggtcatgaatctattggaaagtgcaggattcagtcggagcaatccatactatatcgtgccgcagggacgagtgagtcatgtccaggacgcttctgttcgcttgatcgtgacaagtaagctcataatcttccgcgactctgttggcgctgggatgtcagatcaccgcgatcaccaaccagaaggaatcggagaggctagatcttttaaaagaaatcgctgggacgagtgtgtacgaatctaaacgtcaagagagtatgaagattatggatgagaccagtaagtcgggatgagctgtgacacagattttaaactccatgtcgatttcctgatcgctttcggcacattgaataatagacgccaagcgggcgaaaatcatcgacctgcttgaaaagatcgaagaacgactcaaggagctcgacgaagaaaaagcggaattgaaagatttccaggagaaggacaaagaaaggcgatgcttggaatacgccatttactcacgagagctggccgacgtggaagaggctctacatagtgtcagtattcctgagttttatcaactgcgggacccgtgctgattgagctgggaaactcgcgacagatcgaacacgatcacagcaaaagtgtggacgacaataacactgcccgaagacagttcgatgaacgggaactggagatcaaggcgagttgcaatgtcgtgtagatgctccagcaacctgagctcatcgacttcgaaccatcgcgcagaatcttgacacggcccagaccgaactcaagatcaagctgtcgaacctggcggtccagtcacaacaaagcactacacagctagaggacttgattcgaaggaggactgagcttcaatgtctcatagacgacgtcgatcaagcgaatcaagatggggccgggacgcaagaggaccgagagcaagagcttgagaatattgaagcgcgactcgagcaagttaacaacgagctcaaggcgcttacgactcgatacgaggagcaggtgaagcgagaacgagaactgaggcaggagtcagtaatgaagctgcgttcaggtacaggctgctcgcatctgatgtcggcccacttattttaccatagaatcgataccgcgcaaggtcgacttgaagccctttatggcaaacaaggtcgatcgaatcagtttgcgactcgagaagaccgcgatgcgtatctttccgaggaaatcgcagcggctcaggcctcattgctcgaacaacgagaacggatcgaacgggtacagagcgagctcagggctgctcaacaagaagcagaggaatcaaagaccaggaaggatgacgtcgacacgagcctggaggaaaacaaggaggcattgcttgccaaaagtcaagagaaggatgcagtcaaagcgcaattggacgagcagacggagaggcggaagtgagcagacgttagaggggttagcgtagcaaatttcggttctgaaccgctttactgctttaggtcgctcctgcgggaagatggcaagcttagtcacagtctttcgacaacccgagaagaaaagcaaaatgcggaccgtttattgtcgtcaatgatggacaaggtgggtaatacctcgccggtcgcagtgatttgagcttgacatgttgacgtcggtcgtctttgttggccaggacaccaatcgaggtcttgaggctattgcaaggattgccaaattgctcaagctggacggcgtgtacggacccctttattctctattcgaagtggacgacaaatacaaggtcgcggtcgaggtcacggcaggaaacaggtgatttcgagctccgaggcgatcctcagcgctgaccgcggacaactcatgtacctgtattctcagcttgttccaagtcgttgttgacaacgatgatacggtaaccaagatcctgaaccagatgaagcgcgagaacattcgaggacgggttacattcatgcctctgaaccgactcaagacacccacagttcagattcctcctgcagatgacgttgttcctatgatcagcaaactacgctttgaccgaacataccggctagccctagagcaggtcagtctgcatcctgccgcatttctacatacatattgatcaagtttctggtaggtcttcggtcggacggtcatctgccgagatcttgaagcatgtgcgttatacacccaatcgcacggcgtgtctgcgatcacgatggatggagatcgtatcgatcgcaagggttcgctcacgggaggataccatgatatccgtcgttcgaggatcgatgctatcaaggccgttgccctctggaaagggaagctggatgccgagacagcaagacacgccgaagtcaagacaagcatcctgagactcgagcaggaaatttccgtcaatcttggaagaatccaggtgatggaatctgagcggaaatcccagctagacgaccggctggctctttccacaagagcgtcttgggtcgctaaagagcatgagcaagcccgcctgagagttgaacggatagaacgaggactcgcagaagcccagcgcgaagagcagagcgttcaaagcagaatcgaagcaatgcagggtgaaatggaaaccgccttctcgcagaacctcacggcggtggagatccgcactatccgagacctcaatgcccagcttacccgtcaacaggaggaatacaagaacgtcgcacaggagcgatctcaggtcagtgatttctttttgcttagcaagaggctgcactgatcactattcaaatgcacagactggcagccaaaagcgattgctagaaatagagttgaacgaggatctgttaagacgaagaagcgatttgcgcgactttttgcatgctggaatcacggacgtttctggggctggaacgcaagctggcagcattgacacctggcgggacgaacaggcgaccctgcagactacgattgaaactctgcaagcgactgtctcaggtaaaggaaattctggctgttgcatttcacatccccgagactgacacataatgctattgtagaaacggaaaaagacattgagactgcgaaccaaagtctggtatccaactccgctcgactagacgagttgcaagcagaacaactgaaaaactcccgtgggatccttcaggctcagaagacagctgagcgatacatcgttaagcgtcagactctgacgaatcgtaaggaagagtgcagcaagagtattcgtgacctgggcgtacttcctggcgaagcatatcagaagtatacaaaagagacgcaaccagagaaggtcagtatacagatcggaccccgcttgccacgtgcaatgttgacggtcatccgaacgcagctggtcaagaagttgcataaagtgcaagaacatctcaaaggatattcccacgtcaacaagaaggctttcgaacaatacacgacctttaccaagcagcgggacggtctactggacaggcgggacgagttggatgtctccggtgagagcatccaagatctgatcgagaccttagacacccgaaaggacgaggccatcgagaggaccttcaaacaagtctcgaaatacttcagcgagacatttgaaaaactggtgcccgcaggacgtggaaagctgaaaatgttgaagaggttggatggagaggtaagtgcgcaaatggctgagcagaggattatcgacctgatccaaccgtcttcgcaacgcagcaattggaaacacaatctcaggcggtgcgaacggggatcgacagctacaccggtgtttctatcgaggtgcgccaggcctcatcaggagtgcgagatatgctttgtctgttttcgctaaagcccaagctcttgtgggtgttttaggtgtcattcaactccaaggtcgatgagggattgcagattcagcagctctctggcgggcagaaatcccttgtcgctttagccatgggtagggcgatttgctacgagagtctccgatatcaagttgtctgaccgctcgctcttcttttacagtgttctcaatccagaaatgcgatcccgctccattttatctctttgacgagatcgacgctaaccttgatgctcagtacagaacggctgttgctggttagtggcagatatttcgctgatgatcccttctggccgttaatgaattgcattcaatagctatgatccacgagctgtccacttcggcccagttcatcactacgacgttccgaccggaaatgctggcggaggccaacaagttctacggcgtcctctttgacgcgcgcaaagtcagcaccatcaggacaatcgaacagaaagatgcccaggagtttgtagatgtcagcgtatagcttgccgatgtcaagtttgttgtcagaggccacgtcaaggtcaagaatatgccatataatattgatgtcacactggtggccggcatagacgcagccgatcgctacgaatcgcctaccatcttgagtttttgcacataggctgcgcttcctaccttgggaggcaggaccaataccgtggtgtttcttttccaaaactccaccaggactccggctaacctttcaggcttgtcctggttcaagaccggaaccacgcgagtcaattgggatgccaggcgtcattgcagcgaagtcacaactcacctcatgcagataatgaccgacgtcggaaagcacctccagttggaatttaccttgcctagtgaggctcgccgagatcagcgtagtgctatgtgtcgcaatagccgatctacccacatctgtccgaccatgagctctttatcgagacgttcctgtccggccaagaccagtagtttgccagatctggcagctaggaaatgcgaagacaggtgtaggtaccagtcttttgacccacaggatagtgtatgagaaacggcgatgcgaaccgctatcatcgacaaagcttcttaccttcccaaaagggcgaagtagccatcaagtcggttctccacacgacatctagtgcatcctccgctcgccccggcttcggctttacgagactgggaacggaaacacgagcagactccttgttacggattgctccggaagtcaagctatcgagccacatgacaatcaagtgagtctactccaggccgatggcgtgttcaggcctactcactgccagtcgatggcgccctcgatcgaacggaactttgttgggcgctgcgacaggatgctgcgcatcaaaggtagtgactccacagcagtacctataccaaggcgatcggtatgcgtgtcggtctagaggtacccacaggacttaccctcgacaacgtccagcacgattactccaacaaccttgtatcctcgtttctgcagaataggcgcggaagaaatgatcggggaggcacccatagagtgtccaagtagctgcatagatggaaaaattagcggtcgctctcgacttgcgatatcgtctcactcactacaaggtccggggctaccgccgaatccggaaagatctgacagatcatcgcgagaaagtcttgctgcaggttctcaaaagaaagctccaattccttcgtcttgtcgtcgatcgtggttttccctttcgcaaacgcctgtcagcatggttcgaagggtcaggatgataggtactcaccatgcccccttgcgtcaaaggtcaagactccaagttccccgttgcttttctctttgacttctttcgctaaagctgaaaatgtggttcctgaactacctgcgccatgatggcagacgagaagcgatggctttctcccgccactatctaccccggacgtcgcactgagatttgatggagtgtaatatgccctgaactcgcacggatagccgggaggattgacctgaagagcttgcgcgaaataggtcgatgccgagatcggggacaagtcggatgatgcaaacatggacgtcttggtttgcctttgactgaacgtgacgcatatgacacatataagaagggagacttgggcctcattagctgcgctcgaagggggataccaagagcactgacttctggtttgattgactaggcaaagcagcaagaccgctcaaaccttcctctgcttcaacaagttcctccattgaattgatgtcttcttcatcctctccagcccagggagctctcgttggcggcatcgctggcagtcgattcaagacggactgtctgaaaagatcatgcgacatgtctaagtttgattcggtagggtatggtcaagcacgttgtgacatagacgacgagatacgagtcaaggagaagaagcgatcacttgaaagggggtgattctcggagatgaccgcgtaccctcagctcatagcaggacctgcgcctcccgaccacatcttcaaagatcagagacggatcgctcaacgaagtaattagacacttttgtatgcgtgcctacatatatacaacagcaatatgccctatagaactggacgacccttgtgccttttgtcgcgtgcgagcatggaacctgatggtttcaatctgcctgaaaattatactttgatcatcgagttccactttctagcaggttgtccagccgagtaatctcctctcgctgcaaacaatggatcaacgatcagtcggacatactcacacaaccaaggacttacgagagaagccagctccatttccagcgcaacactccgtaccttctgccaactgtgacaccgatatggtcaattactactccgaaatgcggagattggtcttggtacttgccctgtgtgtctagcacatttacgcctgggttcaaggcagattgtttgccgtcctgcagtttctcgtaatattgtcatgttggcagtgttgtctgccgtcggatcgtccgataacatcacttcgttgaatccgcaaggccggcgttcgtctgcaagattcccggacttcgcttttgtcgtctttttccctttcttcttcgaaacctccatagcttcttccggcaggacctccaggtcgggaagctcttctgtgagcctgagcgcataatccaagacagtttgcttgtcctccgctactcttactcggtgctccaaagcctgtttcctctcgtggagcaccgactgctcttccagagcatcagcgttgcgtctgtgcaatgcggatgccgcacattcgatgcgctttccagaagcattcgcgtgatcctgtatataagcttctggttggcaagcattcttgacgtgatcctctatttggtctacatccatgccacggtcctgcatgagagatgacatatgatggaccccgcaggcgtcagagcagtacctatagtaatcgtacgtcagtgaaaagtgccgtcctcgcagcattccggtagacactcacttggagagaggttccttcctaggtaggcgacactcagacctcaggcacttctcaagaaatgtggtagaccaaacgatactaggatcttcaaaaggcaacgtttttaagctcaaagcgctatttgacgacgaccggaacaagccaatttgtacctttgtcacattccggacagctgtagtacccaacgagagggaccaatcgcgagtttaagcccacgcattcgggatgataccagccgccgcaactggaaacaagccggattagatgttttatttttccaatttcagtcgaattagaataactaacccatcgcactggatcatttcccgaccatcgtagtcattgtatggctgtttgcagatgcaatagacctcatcctcaccctgatccgttccggcagtcgttggttcgaaaggcgatacagcgcgctttgactgggatttaagaacgattgatcgtgaatatcgtgacggaacgagacgattcgatgaggccgtacttttttgttggcaggggcatcagagccggtatggccgatgctactaggtgtaggcgaattcgcctgctcatcttggagatttagaggaacctacacatagtgctggacgcgaagactcaccttggcgttgcgtttgcctgtgcccttcttcttttctcggacatcttccgagagcacgctcggcgaggcaccataatccatcgataggctgtcgggctcggcatcttttaccaggccatccgaagtcatccctgtcttcctgttcttctccttttgttttggccggggtttctgtcgagccttggtctgattgggcgtatctgcctccggagcctcgtcgagggcatcaatgatgtcagcatttaatgcctgcccgtcgaaaggccgggcgtctccctcgatttgcaagcttgaggcaactttagagctgcctagttttcgctttttctgcattctggcctcggaactagcaggttcatcttgttgcatcttgtcggtcccgcgtttcgatggattcgactgctccatctctccctgttgttgacgcatgaatcgggcgaattgtcgttcagacatgcctccgatgggaaccgcgacgggcttagacttagggatggccgcgtgaggctcaacttctatagcgtctgacatggacccgatcatctgcggagccaagacctgctcggtcgactcagactgaacttccgctagagcagggacattcgttgcttcggcctgggattgttgaatgacccgttccagagtcctggcactgacgtgaccaattgctggggaagcgccagacgatcctttttcgccctcggtaccgacggcagaaggatcaaaagcagcgactgggatcatgtcgatgagcatgcctgagtcgccgcttttggacccgatacccgtggtcaaagtcgaaaaagactgggccgcagtgttttcatgctgctggccttcatgctctttgaccggtttcagaaccgactctcctactccaccaggaccttgcacctcaagtcgagcgtctgggcggacagaactgtgatcgtcgagctccgcgcgagtgggctcgctcatatccgcggcagcatttgcttgtgtggagactacccgcgaagcccgggaatcctctgggttactcaatccgtcgtctcgttcgccgataagatggtcagtcccattttgcggcgcattaatcgatgtgggaggcggcgccgtgtcagcgacggatcggtcccgtgcgaagtccatgttcaacctaacgtaagcttgccgtttaggtgtctcttcaagctcgaccgattcgtccgtatcgctctcctctggcaacccggagggcatctcttctgcggttcgttccacatgatcgccaggcaagacatccgattcattatcggtttcaccctcggcatcgagctcttcctcgacttcgaaacctcccgtattcactcctcctgcggcgatagcaagtatgtccagtgggttggtcgatatagttgacggcagaactggaaggtcgccttcaatcttctgcacctcgatagtggcttgtggaacgtccatcactccaggtcgacccccctctcgatccagctcgacgccggtcgcatgcgggattaccctgctcgggtcctccgaatacggcgtaggatccgaaatcatgattgactcagtgatctttgaaggagatcttacgatgtcagctccatgccgagaaccgtcctcgtcagcatcagcgaccgtaaccaggcgcggtctgtcctcggctttgacagggctcgatgattgcgttcgtgagtcggtcttgctccctcggctggacctgcgtcctctaagggcagttttggtactatctcgagagcttttcgaggaggatctccggcccctcttggcggttcgaacgggttcgttaaggtcgtgaatttcattactggcaagggggtcaggagatgaatcttgatcgcgcttccaggcaaccttctcgggactctgacgagtgaccctgcccatcacatctaatgtcaacaagatttatcttttcgagcacatctgcccaaatcgcatgagttgcgtagaagcagcctagggtcgagtgaattatattataagctatcggttgttatcgtccgtgttttggcaatacgtcaggctctagctaaccaagtagtagagtcgagaacgactcgagttagtgcgaagtctggtgattcactaaatctcaagggcgacgagtctatggattagcgtcccgaggggggaactcgcaacgggtcgagagcgctcaagcactcgatgttgattcaaggtatctttgagacacttgcccactactcgattccactcgacaaggaaccactcgcacatacgatatatcgacaagatggccgccaacgtcgaagattttaagagtgagtcttcacgacaagggataccgcgtctagcattctcactgatattatccgcgttccgccaatgattttcctgctattctctgaccctcttcggtttggactcgccaactatcgctatccaataaccctctacagagcgtctggatgagcaggatctccatatccgagagtcatgggttgccgccatgaaggcccgaatcgtacgaggagagctgatcaagtgccaacgaggcgagggagtcaaccactacaagcattgccgggacctggccgagatgtacacgggaatgatccgagagaacaaggttagtcacgaatatccgcgattatgcaggtagtcgcaggtagacagaggacgatacgttgccaacgcttcaggactgcgtcaatggcagcccgggtctcgggacaagtgtcgagacaagcctattctgccggcacaacgaccgcaactgtgcgaacgccgatgttgatcctcgactccacgtttgaacaccacaggtcaagggttacaagatcatcgatactgagtaggcagctgtaggatagggagaggggtggattgaggcagatcgtaaccggcctggacggttggttgcttatgggaagaagagaatgtatgatagagtgtcgggatcgatatacaagccagataagactcaccgatgagattcgtttgaagagagaagtggcagcctaggcttgcatgtgcgccatcagcatgcatatgattagcgatcagcggctactcgatgacaggtgtaccgcgagcgaacaattcgacgtcccggcctagcttttgccatgagctgatttgttaaacgtggtcagacaaaggtcggccgtctgatacgattgcgttgactcgagacgacctttccgcaaaatttatcgtgttaatcgatcgggcggttcatacaaatcgactgccgagcgaacccgcgatgtccgcaaatgggttgcaatcgttacttgttcactttcctctcggtcgatctcgctgtcagcccgctcccgtcctgatccatctaggctcgaccgtatggacctcgtttcccttgcccgttccgcatattcatctaccaccgctctagtagttgtctccttcctccttgatagcgctgaagcccattctcaataaggcatcggtcttgacgggctctgtccgcttcttgtatgcctgaatatcgtggacagccggaacgaaaaggcagtacggagtcggtcagtacgagattgatgggcgctcgacatactgattcaacgtaccttcttttcctcgattgaagccataatctccttcgcttcctctgcgttggctgcaggtcgaagtggtacttcatcttccacatcgagatcctgatagacgacgagggaacgaacaaacaactgagtcagaagaaaatccgttggcatcggctccatgtcgtccccgggactcacgacctcgccaagaagcaccacgttttcccctcgaatcaagaaaaggccgacgtatgcgtcggtatagattggtttatgagcgtgaaatagcctctctattgtcgcctccaaaactaggttggctgtgcagtttgagataccagcaaaaagccgatctggtcagcacaagagtgctcgcaggcgaacatccagcgctggcgcgagtctgacccaccgtattggtcgtaactccgcaggactcccagtagattccttccatctctcaaaacgatcaagactcgctctaaaatgagcaggccggcgcaaaatcagagttcgggttgagatggtctctaggatactgtcacgaaggtactgagctcgactcactgtcgacaatgtcaaccaacgatcccgatgttgtgaacgggataagggcgtccatgatggaatggatcgttaccctggttaccgtttactgctgtccaattggcgaaccttgtcaaactatcctgttcagcacattttgctactactcctacaactacgcaactactactacccactgtacctgcaggtcgatcacccgtttccgaggttacggtacagcttggtccttgatgatgattcggaaagatacgcgtcgctttcgcgctaaaatcaacttggcttgtaggccacctccgatcggtcggtcacagcgacgagacgtccatatgctgccagccggtccggtcgtgagataggtaagagcagtctcgtcgacatctagtctcgctagctcttgggagacttgcagccctcaagtggttcctgtcgaatcaaaagccttgcgattttgctagatctgtacaaggcgtctcccctctcaaccaaaacatcgaccaagagataacaggtttgagccgtcgggtatcgctttacgtcacgcgtcgcgcacacttcgagctcggtactgatctgaacgctggacgattaaagctcaacaccgaacaacaactcctcaaacccgagcctgctaccagctaccagaatccagaggatttaagctcgcccaaccggaaaactattggtcaagcgtgacgttcgaatcaagccttgcgatatgacgggcggaggattcgccctgccaggagctcacgaggactactccgaagacgaagatgaaggaaacacgctcgaaatgtccgagctcggcgaaggagggacgaccaggagaagagagatcgaatgggttgggaaaccgcatgtagctgggcccgaatggatgaagctgcctctgtgagcaaaagagaccgacggaacctacgcacagcatgagctcatcatggcggcctcgtgcgaccaatatttacagactgacggtgtgcatgttggggctccaagtaagcccgtctcgtcgctgctcaaagtgcttggcacgaaactcactctttctgaacttttcagtgtgtatggtcgatcgaaatgggatacggtgagcagtattctcgaacgcctcttcgagggagtcgcacaactgacatctcatcttcagcttcgccatatctgttggagctgggactatcaaaatctttgatgtcgctcgtcttcgttgccggacctctgagcggactcatcatgcagcctcttgtcggtaagctttcctcgaaccgcacccctgtggaacgcccgaatgactgagaatctggttgatctgttgtgcaggcattttcgccgaccgttccaaatctagattcggtcggcgccgcccgttcatgatcgttggttgcatcgttagcgtctttgcaatgatgctcttaggatgggctagggaaatctcggcattctttggaggggtatgttggcatgaactcttcacccgtcgtcgaataggtatcggactgaagcgagaatctctcgtcatgacagggttcgaaattcgccatcttcctggctgtctgggcgatttatctggtcgatttcgtgagtatgttcgtgctgcgagaggatgtgcagtcgagctgacgtcaagaccgttgataaaaagtctatcaatgcgggtgagcagcacgtcgatcctcgtcatcacaactccctgtcgctctgctgaatcgtgcattaatgtcgcacagtccaagccgtcgaccgagcactagtggtcgacattcttcctccttctcaacaggaacagggtaacgcttgggcaggacgaatgtttggaacgggatcactggctggtttctgggtgtaagccacgctatgcgagctaattgtttcaacacatacttatattcgcatctcgcagcgggaacatcaacttgctcaaaatctttccttatctcggcaagactcagctacaagtgctgagtttcttgaccagtgtggtccttatggcgacacacggccttaccgcatacagcgtcaaggagagagtactgtttcgtgacaagtgagtttgatacgaagaattgcgtgctgaacatggtctaaccaccgtttcgatcggtcagccgaaagtcttcgaaggctaatatctgggacacgatcaagagcatttggacaaacatcttcctgctacctccagccatccggtccatctgttacgctcagtttttcgcttggattggctggtttcctatccttttctacacctcggtctgggtaggagagatctatactcgccaagagatcgctggtggtcggtctgaggatgataccgagctagccgcggatgcgacacgagcggggtctagagccttgttcctgaatgcgtgtgtcaacttgaccaccagcatcttccttccttttctggtctcctcttctggtatcagagctcctactgccgagcaggtgaaaaggatggcctcaagtggcgcacctcgaacatacggaaacgggttcctcggcaggatcatgcctcaactcgaccgcgtcagaagcttgatccctctgccaaagaggtttcgctttaccattcctctcccttggttgactttgatccggacctgggcgatcggccaattcatgttctgcttcactatgctcgctacatggtcagtatctacttggccgatcacgccgacacaggaattaactttgtctctctgtaaaggctggcgggatccgtgttctgggccaactgtatcattgcattgaatggcttttgctgggcggtcgcccaatgtgagcatctcgcttgtagcgagccttgagctagttttttgctgacgactgatccaattacgctaggggcacctttctcactggtatgtgctctgcaatgcaacactcaccgatgatgattaactgaccagtacttttagttgggggaacttatcctcctggatgccaatcccagcgaaatggcggctcccagcactgcgtccgggatccgggttagtcgcgacgtcggcagaagatcacattccgcagacgtgcggaacgagaggctcgagcacgctattcgagaccacgaggatgaagagggcatgctaaaggtggctagtctggatgaccagactcgtggagttctcgatgatcagccccatgagaggttcactcacctgcaccccaatcaagactcaacggggaaggatcgttcttctacttcgcgcaagcctctggaggatgatagatcctacgacccgaccgacttccgcgccgatcgccaatcgtcttcagcggaacagggtgggcagagcacagccgagaaagccggagtcatccttgtgagcctggtcttcttgagatttctcggtagcttgagctgacagaaatttgtacgaaaagggaattcacaatatcttcatcgtagtaagcgaagatcgttatcgctttcaagagtcacagcgctaagagatgtgcgcaacaggttccgcaattcctcgttacatttttatcggcgatcattttctaccttcttgagccgaccaggcctactctaccagaacaccatactagcccgcacgtccctgtcaaaggcaacatcacgctgaccgacgggacagaaggctttgatcaactcgaaggggaactgtccatgggaggtggggctcgccttctggctcgtgcggcagtgcatgctttatttcacgacaagtcaagccgggagctggaagctcatgttatcagcggtacagattcggtcggtttggttttccggtaagccacaattagcgtggcaccatcgacagtatccacgctcaactggcactgggcacccctctcaaatagaattggaggaatcagcgccgctatcgctggattgatgtgcttacgaatggctcgacagtggaagcgggacttcggacaatcgagaggatacgccggactgccgcaggctgaatatgagctccagaatggaaccgccttcgccgatgatttcgtttcgccgcccagccgagccatcaaggatggtatacatcttggcttacagaacatgcacaaactcatgtctcatctgccaccagtcaccatcccttacattcatattgctggaaccaatgggaaaggttccgtatctgctatgttggacagctgccttcggcaagccggtctccgaactggtagatacaactcgcctcatttgatctcgatcaacgacgctatcgttgtcaatggggaggataccagctacgagacatatatcaagcatcgcaggaagatcgaagcgatagtccaggaacgcgacctcgataattcggaattcgagatcctgacggctacggcattttccatatttgctgccagccagccgaagatagacgtgctggtcattgagtgcggtatgggtggcctgcgggatgccacgaacgtcatggactcggaacttcaactgtgcgcggtgctcacgacagtcgacctggaccaccaagggttccttggtgacacgatcgaggccatcgctaaggacaagtttggtatcgtagttcccgatggaatattggttgtcggcaaacaggaccatccggaggtgtatgggcaagctcagcgaagagcgacagagctcaacctcgacctttatgagactgaccgaaaccctcagctcgacgagccgagcggggtatcctctcagcgcacaggatcaaaagtcgttcaggtcgtcgtggactgggtgcaaaacacgcccgcgaccagtatcgcggtgacgctgcctttgcctggcgagcatcagagggacaatctcgccacagccctcatggtcatgcaagtcttgcaacaccacgagcggacaaagaaaatccagcctcgtctacaaagcctgagtcaagagagcatcagaaagggcatcaagggcacagtatggcgaggccggtgcagctggctccgtttggtataccctccgccaagcatgggaccggtatcaccctccctgcggcacgtggaagtgctcgtggacggtgctcacaactcgtctgctgcattccaactccggcagtatattgacagtatgaacgtccctgccaccaccccaatcacctttattgtcggattgtccaaatcgccccccaagactccggccacggtcttgcaacccctgctcgcaggatgcaggagtattgatcgggtcatacccgtcacattttcgactcccgttgaaggcatgccctggatcagcaacgtgccgatggaagacgtccgtaaagccgccatcgaggctggcatatggccagaaaacgtcattgccattactgctgagcagcaagacgacatgtcgggcgcttctctgcttcaggcgttgcagacgttggacgcaagggatcccgggattgtgatcgtgacgggaagcttatatttggtagcggatgcatacaggatggctgaatagcgatagacgcatagatgaaggtgcattcagcatgaccgcaacgttgtaattgtacatggagcatacccatcccgtgcatctctggttcgcgtatacgcgctgcgctcgaacgcgatcgggccggctattgctgatccggacgagcccgagggccttacacctccagcccaacgtgtttaccaccacataaaaacctgttcgcagtctagtcttctttatccatcaacagtgctgagaatctccaacaattttgggttgatctcttcaccagatcaccatggaatcgtcaggatatctgctgacatcgcccaacgagccagagccccgtaacgtcgtcactgcccctgcaaccggacacgctgccctgagcgggggcgctgtcagtcgtaacagcgctgtcgcctcgaatacaacgggagccaatcaagaagccttggacaacagtgcctctccttcggacgtatctcgagacgcagaacccgttgggccaggacaggaatctcaggcagacgcgagcggatcaggatggcattgggcagacagagcacaaatctgtgcgtatcatgccgtacatcgaaatggtagggacatatgactgaccgatgggatcgcatctgtagtaagatcgaatcagagagacagcttgcatttgctcaagctccaagatctatttgccgatgtcgttcgttccctcatcggtacgccattcagacctccgacgctatcatttcaatgcgttaagctgaacatcgccccacaggatctcgacgatacttgtcgaaccagacagctgtatccgtcatctctcaggccttgtactatgggctttcttttggtctgggtgagctgtcaagcattcggtgcagcggttcttcctctgacatctcgtaatatccctgtgataggtacccagactttgggcgaggaatacgtggagatttatccatatgttaatcgaaaacgaaactttccatcaaagttggtgagttctgcatgtgcgggtcgactcgggtaaggatcccgggttttattcatcgtctttggatcgcagcgacgtgtactttccctcgtggtcttgattggagctccgcacgccctgagcagcatcgtggaacgaatctcacacggaagtgcgagtggcgacctgcgacgagaagcgcccctcaccaggagacagatccttatcagatggctaggatcaggctgggtcaaagcgctgccggaactctggtttgcgtggttcctgatcaagggcagaaacgcacagtggacgaagagcttgatgggaatgagctacgttagtcgctggaagaccatttcatctgccgttcctggtctgactggacgcgttggcggttctatagatcaccaattcccccgctgcagctcaaaagggaccttccgcttacgaacctgtagggtttctcttgctcttgcccctgataaaccgggttctagccggctggagggcaaggagagctcaagaggaggccgaagccaggaaatccgaagacgctgagctggctcgaaagggcagcgacccagcgatcgcaaagacgattgcctcctacttcatgatcgatggcagacccgtcgacctagcgagtctcgggacgaccgatggagaccaagcaccaactggcattgatgacgtgtccgcaagtacagatacgtttacttcgcactcgatcttaccaaagtctgcactggtcaaccccgatcggcagtgccctctctgtctagcgccgtctggcctggcagaggagagcgggggtacctgcgcgactgagtgtggacatattttctgctggtcctgcatccaggattggggagccgaaaaggtgagcgcaggtgaggtattgtgacgcggtcgcccgctgacaaaacgttgcaatcaacgtgctgccaaagatggaatgcccactgtgccgtcaggccttgcggctagagaggctgacgccgctctacaatctctgaaaggataggctagtcggccacggctgaatatgcgtagatgctgtcgtatcagaagttgtccattgaatcgttatacatgttcgtcgcacgatacgcgtcgttattgattcgttagtataaaggttaccgcatcgcgttgtttcacgatctactgtactcctccttgatttcgcccagttccgtgtggctatcgggcgccgagtaggctgcgggtttggcggaagagagaccatccgcactttcgccactcgactgcggtagaggagcggcaatattgggttttgtatcctgcttttgtataggatgcagaacggagttcatatccgggaacgcatccttcatgatgtcgaccagggtatcatggtatgactaggccagagatggctataaacccaggcgagaacaaggattcgagattcctacatgtacgactcacttcatatgctttgattctggcgttgcccagctgattcgcccgtaaggcggtactgagaaggtccctagtccagcgatgaggattcatcgaatcggcatccacttgcctatcaacgggtgatgaagctgtcagcttatgtatacatggcactttgtagttgtgcatgatcgacttactttacagcatccgtctgtaccgtctcgtgcatatgtgttgccagtgaggagatgtccgagtagtgcttgaccaaattctcactggacggcggcaacagagctttagttgcggtccaaggtcgctactggcgttgtgagcgcatagcctgtacacgtacatgtcgttgacgagaaactctctattatcctcttgaacgtctccggccctgagctccatctgccagaggcagtctatggcggtcaagaatttggcctcgagctgttcccgctgtcgagccgactcttgctccggagtgaggctggactcttcctcgactatcctgttcttcttgatcgtgagtttgatcttgggcgtggcttgcatggcggcgatttgtctctcttgattcgccccatgtatctctattatccaaattgtgggataagagatgttaaactggagaaacgatgaaacgatggttgatatcaagatgttcgatgttcgatgttcgatgtccggcttggataggatgctgcccgagccaggtcgtgcggcgtgacggcatttcgtctgttatattacgtcaaccatcacgtcaattcatttccggcgcgtcccctgtctttctgcttctcgcgtcttggccggtgcgagaccgaagctgattctgtcgatcgaacggtatttgtgttgtttatccccaagcttctgaacatcttgatgcttgcgagcactggtagtctgcaatcaacggttgaacggcctatatggtggtcatccctgattgatcgacgactcgccattctgctggatcaaacggacccgtgataagagcctgatgtcgaccatgaaccgtcagctcgaggaccgggtttgcagccacttcggtgtggattcgtcagagattgatgtgagccacaattcgagttgtcatcatcatctttagctaccttatgaaagcgactgatgtcgatgtgtttcgttaatctcgttagcaagtacctgatttcgtcttcgatttcatgaacaaattcgtgcaagagtttcccaacgagactgagtttctcttcgaagcggccgagcccaatggtgatccaagtaaaggtggtaacggatttggtattgcaacatgtgagtcgcgagtacgttccagcctgaaacgttgccaaacatcgacgagattcgttcatgtttcgataggtaccgaggaaaactgtctggaggacatccttttgactgccgacccagatctgcccgacggcggacggagcatcggtttgggatcgatcgataccattaggatgcatgtcatggaagagcctcacatcttaacgagagacaaacgtattcgtcaggagaaaaggaaggaggcaagaatgaaggtaaggaaatccagtttgatgaccccgcggtgatgcggctcactcgtcgctcatctaatcaaacagaccgagggttccatcgccgagtatggatcccgtccgtcaatggctcagctggaaaaggctgcctcgcagtcgcaaaagattgaagagattagcgattccgaggatgaagacaggccaaccaaaggacccgcccggccgaggtgggcagcaatcagaatcgatgcgagcaccgaatgttcagagacggaagtcgagagcgacgatgtgaagcccatcagtcagtccagtccggttgatgcctacggcattgcattgatcactttgctataccagtctcgatgccaacgatcaacaaggggaaaggaaaaggaaaggcaaaagctaaccattccaacccaatcgtcctttcaagcgatgacgatgatctccccattcgaagcctcggagtcaagcggcgaagggagctcaagacaagcagcagtatcggtagcgatgttgccggagcgatcaagatcgattcagactccgacggcgacgtaaaacccgtcttctcgagcacgccgggaagcgttcgcaggaaacaaaagcagatgagactcgaccgattctacagtggcgggaacgggagcaacagggaggaagtcaagcccgatgaagatgacgagatggacttcaaaccccggatacatctaccataccagccagcagcaccgacgtcttccggtcatttgcgctcaaccgcttcttcgattacagcacctacattcaacacggtccctgcgggtcaatactgtgagtatcacctttcgcttccacataggagcaatctctcactttgaccttgcacgccctcagacgaaaaagaggaggctcgacagcgtttggcagctgagaaggatcgtttgaatcaattgatgaaagagccaacgatgtctggtctcaagccattgatcgacagaaggttacaggacctgaatgcaattgtgcgaacccgctttgccaattcagtcaagccctggcttccctttccgtccaggacatttctggaacgaatcccaggtctgagcaccatttgggctgatgcaacggatatgcatctaaagcgggacgagtcggagcgactgaagatcgacgcggaacgtgccgccgcgaggttgcgggcccaagaagcacgggtgtatggtctgccgggtctctcacaagatggcaacgccgaggccggtccaagcttttaccaagctcatccgggagctatgctcacatccagctcgcgggccatcccaagcctgacacggtccagacccgagaacgaagaatgggacacgccagtacccgctggacttcctgcccgagaagaagagtgagtgtaacagctacaaatcaagtgtgggctgctgacagaattacggagacaggcttgccaaattcttcgaggacgctctcaacggattcgctgaggatgaaactgtctctgcagcggctacgaaactaggactcgcttctatggacgaaaaactcccttccatgacagtaactctcatgcctcaccaagtcattggtgtcgcttggatgctcgacatggaacggcatcccaatcggcaaggtggcattctcgccgacagcatgggcctagggaagacgatccaaatggtaagcttgttaggttcttgcgctcgaggtcgtccccttacacggattctatgcagattgcgacgatagccgagaatccatcacaggatcgaaagcgaaagacgacgctcatcattgcccctgtggctttgctacaggtaagtgttaatcgcaacgcgtcgcagtacagcggcatcaaggctgacgtttgcgtacctcaattttcagcaatgggaagatgagatccgacgctttgtcaaacctaaatggaagatccatctctatcatggaaagggaaagatttcgctggcccaaatgagacagtgcgatgtcattctcacaagctttggacacgtagccggtgcgcttccgtccgagaagccggatctcaacaatgactcagaggaagacatgcaagcgaagggtgaccttttgaaaatgaagtggtaccgagtttgtgtggacgaggcgtcgtacatccgaaactcaaagaccaaggcagccaaagcgatttacgagctcaggtctacgtatcgatggattctcagcggtcagtcgaatcattctagctgcgtgcagatgcataatagcttatcgaccatctttcaacaggtacattggttgtcaacacgctcgtcgatctgtacagcccgttctattttctgaacatttccgaactgagcgtttgggccaacttccgtgacaaaatcaagagaatcgaaaagagacgaccggatctcgccgtcaagaggatacaagccgtcttgaaatacgcttgcaagaggcgaactgccgattccaaaattgacggacaacccattctcaccttgcccgaaaagaccaccatcaaacggaccgtactgtttgatcaggatgaacaatcagtatacgatatcatcgaggctcgagcaatcgctagattcaacaagctgctcaaagccaataccgttttaaaaaactacgcacatgttctgacgatgattttgcgacttcgtcaagtttgcaattcggtgtctttggtggttaggaagccaggcgaagctgggcatgcaaacgagtaagttgggtggatgcgcctcgcatcggttctgacacgcagctgatgtttggtacccatttttctctagtctattgatttcgaatgcagaaatgacatttaatcccaaagcgacggaggagcctacctggaacaaggaggtcgagatccaaagggctcgtttgatcggcggagatgaattggtcaacaaattgatcatcaaatatcaggaacgtcagtccgagctggacaacgcagataaggatgaccgcctcgaaacgcgcgccgaagacgaattggccgacattgatatggaatgtgctgtctgctttgagccttttggagacgacgagcgagtaacaagtcagtatctgggtctcaaattctggcagagaaagggctaaccttgacccggacagtttgttgccattctttctgtgagccttgtccgcggaagaggacaatcggcacctcggactcacgcttgtgacctctctcttctaggcacgacttgcatcgagctcgtcatcaaccctacgattccgaaccccgtcatcgtaagccgtgatgcgactccttagctggtgtaccgggacgagctcacgtcttgacttgtgtaatttccaggcgtgtcctctatgtcgagagccgctcaacgccagcaaagtcttcatcgccgccgcttttaaacctgccgaacaggtcaaagaggaagacgtagctgctgatatcaaaacggagttgaacctggacgaaaagatgccgccgtcgaccaagatgatccggagcttgtgagtcgcgtgatgtgcccttgtgatcgagcccactgctgacgatgtcaattcggccacggcagggagctggtgaagggatggcttgcggctggacccacagacaaggttatcatattctcgcagtttgtcgccatgatcgatcttttggacgaccactttagggcaaatggcatcgacgtcgctacgtacaccggacaaatgtccaaggacgaccgtgacgaggtactcgccgacttcaagcgtccggagggtccctcggtcatcatcatcagtaccaaggccggtggagtcggattgaacctcacttgtgccaacaaggtcatcctgatcgatcatacctggacgtatgctgctacagctcaagcggtcgatcgcgcttggcgaatcggccagaccaaacctgtcgaggtcgtcgagctgagtatcgagaagacgatcgaggcccggattctcgctctacaagaacgcaaaaaggctctcgccgacggcgcctttggcgagggcggcaaccagaaactgggaaggttgacgttggccgatctgcgtctgctctttgatcgaaacgcctaggaccggccgacatgacaattttacgtttttgacggactttacgactgtgccgtacaaggcaacgatttacgatgtttgtatgttgttgtttttcgttttgacattgtagatggaaatcactcccctctgtcggatagtatacagtatttgtcgagcaggactctcccacagcgagcgacagggtgttttaacaccaaaggacactttagacgctgtagtcgttgacagccttggcgtagtaaccacccgcggcggttcccgcagcggcgagagcgatgggaataggagcacgggtcttgatagcccgtctatcgagttcgaagcgatgtcagtacggtcgaactcgtccgaaccaggataaagtcgacgccacgtacggtaccatggctccgacgagggcgagcgacgttcctacagccccgtccaccgaccagatctcattcagctctttgcctgtctgcatcacacgatatctactcaccggtagctccctcgtatccatagctcattccctccctgatcctcaatccactgagcatgaacatggatccgagagcgaggccggcgaccatcgaggggatggaccgggtacgggcgtatccagcggcacctccgatgaagcagagtgttcccatctgaccggccacgtgaagacgagatcgggacattagctacggcttggggttcatactagtccgcaggtaggggctcacagtgtaagcaggatggtgagactggtcgagcgggacagtgggagtagtgatgtcatcatgattagtctcgaggcggtcagggaacggctactttcagcggcggctcaccatgatgggtcttggtcgagtggggagttcgggctgttttgattcagatttcgtgtagcattgacaagctctaaaggtaatgaccaatggctatcattcggtcgagtcaagaaagctgtcacactggacgacctgttccgagctgggtcacgcccattcaccattcagctattcgctcgcgccaggcgacgcgcctatttccggtcttggccgggccccgcggtggtcgtctcggccgaggctgaatggaccctcccgttcttaacaatcattgtcgttctcgacctcgggagcatggtcaaaatgagcgctcgcggacattagctcggcgagcaaccggcacaacgggacgggtcaaggtgggtatcgaattcattgaatttgttcacttcgatacacgaaattcatcacgacctaaagtttgaggcgcgttataatcgctttcgtaatttcatcaacaaaacggctcgtctctcgtctcgactactgagctcccttggaggcctgcctctgagccatctcctgcttggccttttggaccctctcggaccgcctggccttcttctcccgctgaccatgttcgttctgcatcttgccgcgtccgaccgagctcagccctcccttggtggaaggggtcgaagcgggatcggccgtgttgacaaagctaaagacggcggatttgctgttctttttcggcaagacgacccgatcgacgagctcggactggatcgcgtcttgaccgacgttaggggtctgacgacgggtggcattgcgctcctgcctaccgctctgcttggcgttggtttgctgagcgacatcatcggcggtaaagacccggttgtagggcacgtcgaggggtccggtcccgtccggtcgagtctgttcggcggacaaggacgagtccctaaactcccatacggcacgctcgaccccacgttcagcctcgatcgtatcccgggtggtgaaagcgctcgaatcctgtccgaccgtcttcccctgcgaatacgcttcgtgcgccgattcctcggacgcttcgagcgaggtcgatgggtgattacgtcgaaaggcacgttcctgcgattcccaagcccacgatcgagtggtcgccggcgtgttcttgggtcggatcggtcggacggcgaggaacttttccatagaggtgaggaagggtgtttgcatgatctgatcgaagcgcggcgagagaaggcaggcaggtcagcatggcagttcaggtcgctgtcttgtggcttgcggggggaaagcgcacgcgcgatcgctcgacgagggcggatcggatgagtgagagatcattcagccatgtttataaaaagttttaaccatgtttgttttggtgtcttcaagactaatcgatttaggatcatcaaagattctcgtcgcgcgcagggaagggggaaaggggcggaaggggtttcgacatgaagagcagggaaaaagcaaagtcgacgcttacctaatcgttgtgtgaaggtcgattgccgagcgaagcgggaacaagagcaaagggaacgagtgttcatggtcagcttctcgattctcctaagctcgtatgaaaacacacgtccaacccctcgacccatcgcatcacatcgcatccctcacgaggacgatcgtatcgtttcagaaagtgaagaaaatttttcgtaaccatattttaagatgatgtcttcagaacgaaggttatgtcatgattttgtttcatcatagatcgatcgccgagtgagagcgagggggagtgcaatgaggcgatggcgagcgggcgcggggcggatgaaggggaaaggggaaaagaccacgacggacgacgaagacgaaaagactcaggatgctcacctctccgcgttccttcatcccgcgttcgtgttccttcaacttcaagacggcctctactcgtttcttgctgatcccaaactcttcgctcactcgattgatacgcttttgcaactcggacgaggcgttcgacgacgacgacgaggtcgacgaggagttggaagacttctttgtcgacgacgagagggattcgagcgtggagaggatggcggaagaggaagagccgccggtgtagacttcagagtagatgaggtctttgaggtcgttgctcaatggtgggggcggtcggaaagaagggttcgaagggtagggctgggaaacgggggggagagggaccagatcaggatcctagtcgaggtcaagaggggtcgatggactcacaatctccttgcccaaccagttgggaccgttcgacggtggttcgcggtacagggtggccacggatttcaaccagttctggtatccgggagcatcaggcttgacccgtgcgttccgagcgtcatcgttgttcctgcctgacgctgctccgaacccgcgggatcgaccttgacctgcgatctcatccgtcgcggcttgttctaccgacggggctgatgatggtgtaccaccgaggagtgcggcttcggcttcagggctacctggtgtgatgggttcgctatcgaccgacgtggacgctgctcgtcgacacgaaggacatggtcgcgtgcgggatgcggccaggcgggaaggacccggtctggagaggcattgcaagaggatggaagaaggggaagacgaggaagaggagagaggtttgaatgacatttcttcttttttttcaaagaaaagggcgtgcgggatgaaggtgagaggtgggtgtggttgggtaaagtggtgtgtgttatatagtagtcgtagtaagatgcgagagttgttgtcttgtgggaggacgaggatgaggggggacctggaggagggagggagcgaggttggttggttggttgcgaggaaaaggcgcgtgaaagcggaaaaaccaaaggttgaccatgttgagatcgatatggtgtgcggacttttcacgtgatcatcgtgtcaacgtgctagctgtcaacgttcttaatagttcattcccatcacatctcgactcgtatgacgtgtacatatgaaaagtcaatgattattggggcttgcaatcaaagggttccatctatcggtaacgtgtggtggctgacctgcatggcgtcaaacaggggcgacttctggactggacagatgatgaaccctatacacgacacaccaacgtctattgatacatcgatactccgtagcgaaccgtccatctctgccacacctcgctaccgcctcacatcatgctgcaagacgaacccgttgtgatatccgttggactgagcatgccctgctgagcttcgatgtcctgaaagcaatgatgcccggtccgcccggccgacgaatcttcaaacgaggcggtggtctcggtgagaagtgagctcagttgcgatcggagttcagactgctcatgcaagtcggcctgagctacgtctttgtcgacggttctgaaccctctgatcagcatttccgccctatcagggagctcagtgtagacgatgaagcgcttctcagagatcatgcacgttccggtcaccttgtcaggggtctcgcatccatactctcggcgcgaacattggaccaggcaaaatcgttccatcctgaggtaacgttcttccgctgcgctccctccctcttcgaacacgggcacggaaatggctcagatcgaccccagtcaaccctgaagtctcaacccacttgctgggacatgtttcagcgtcgatgcccgcccatttcgcaaacctttgatacttgtcttgcgcgtcacctgtatcataaggtaccagaaagaccgcgtcgagttgctgggaaggctgtcggggcgcaaagagatcaagagagcgctcagatgattcaggagtatttttcgcgcgcacctttgaactgcccttgttcatcagttgtagttctagagaagatgtttgcgttccttggccagaatcgcgcgttcggaggatacaggcgctactcgacttggaaatggtcaaatcattcaagtgtaaccgctcatcattggccaaactttatgtgtatcacgaaagttcgcaatatctcctgacaagtcctagtgataataattgcataccgtacaaaggagtgtcggaaagccacgagcttcttcaatcttgcctagaacgcgcacacatttccagcccgtcgactcgggcgaggaccaggttctcgagactcgtctcgatcaaaggacaacgtgcgcttctcgcgcaacccgtcacgtcgcatgcgggttagtcgccagaggagggacgaccgaactctctggcttcgcagtcgagagtggtgtcagctgatcaggaatcggtcgcttgcaacgaacggcaggcagtcacaaatcgagaagctgagcgggtagatgtatttcttcgttctgtggccgaacctacgacaaacaaaggttccagtcgcaacgaatctttatcacagacgacacagcccagaattctgatcccctcagcgagacgaccatccgagcgcttctcagaggatcatcctcacagtgagaatatcgccattccagaagctccatgacgtctcaacgattggttgctcatcaagctcatcctgtattcgaccatcgatgacgcaagaaggctcgcttctcgaaaaccgcggactgactctggccatctctgattgcgtgggcctttaatctatggatggcgtcagccggtccgtcgtcgcatggcaaccctcaccacatcgacgacagggaggctgccgctcgcaagctgaagactgcgatactgccaacccaggtacaccgtgtgcatgtcttttattcacaagaagaaacctgtgcctaagctacaatcgagacccgtctagagctcatcgtgaccctctacagaagtctgctcgtcatcgtcgatcgcgccggcctcggcctcgtcggcgctgagggcagcctcgatcgggttgttgctgttctccatgacaaagtcgatgagcgactcgagggatcggtcaccgttgtagtcgatgaactctcggccgccagcgggcttgaacttgagagtggggaaacctgaagggtcagacgagaaaggggaacgcttgttagacggagctcggagtacttctacgagctttgcggcttaccggcaatctcgaaaggagcgctagggggaacatcgttgtcggtagcgtccatcttggcactgcgacggaaatcgaccgttagcgttgaatgtgcgcgatacgtgtgtatatacattacgtctactcacatggtcaaggtgtcggcaaattcttcaaagtgctcggccaaagtctcccagatgggcgccaatcgctctgtcgatgcggaaaaggatgtaacgctttgtgagcaaacgagttgggcgcgcgtgcggccgatcatgcagctcgggactcacgacagtgtccacaccaaggagcgtaaaactctacgaaaacgtccttgctgtcgtcaaacacgaccttgtcaaactcgtcggtgaccaaggtgaagacggcctcgtcctgggacgtagggataggagcgctcttcaaggtggggctcaacttgtcctgggtaaagtcggtgacaaacttcttgaccgagttggcgtccaccttggatccggtctctgtcaacacaaacttcttgcccttcgaggccatgtcctggaggaccatggcggggaggtcatcgagagggaccgagagcgatttcccgtgctcggcaaacttgacggcgtcgatccagacaaagttgacctggttcttgaatgccttggcgacgggcttgagggtctcgacgagggactctcgagatttgctagtagggtcgacaaagaggtaggcgaggggcaagttggcctcggcgtagacggcatagttttcaggagaaacctcgtccatcaggggcaacgagttttcggcgatgaaggcggtcaactcgtcctcgtcttcggggttaccctggtagatgttcataccctcgtcaaactttttgtaaagaacgattccatggctagggaggtcgggaggagccaaagtctggtcagagacgtgaccaaagaggtagctgtctcgaagcttgtcagcgaggctgccaaagaccttgggaatagccgattcggggtagtaggccatgaggacgctgtgcgggatcgagactaatcaggctcggtggcttgacacgtgcgggaaatgcctactcacacgttctccatggccttgaagctgtcgtgcttggaagcgtcgaccttggagacagcgggaagagcttgcctagtcgaataaagacctcagctctgtgttctttcgcgtcgagggcctggccagggccagtcttgacgactcacttcaacatgtaactgacaatcccatcagactttcggggaccagagtagtcagagggcgaacccgatcggaacaccttcaaggtgctgtgccgatcagatacgatgtcgtcagcatccgagcaacgtgtgcgacgttgaagagccgaaaactcacgggtatcctccgatcccgtactcctggcacaagtcctgttcgacggtgcagtcgaccttggcgagcttaatgctgcctccgacggcctcggcagcctcgtgagatttcagagtggtggctgcagtctcgtactgaggagcgaggctacgagaggggaagcaagacgttaaatcagcactgtattcgtcacggaagcaactacgacggtggtgtccgactaactttttgcagtgtccacactgatacaggggcgaatggtaacggctcgtcagtcaaaagcgatatctcggccgaacgacagataaagactcacccaaggagcaaagaattctaccagagcgagcttctcgcccatgacctcttgctcaaagttgcccgaggtcaagtcgatgacgtccgagtcggccgctgcgaccatgttggcgaggagcgagactccgacggggaggaacgaagtgagacgcattttttgttgaatgtgtcttgactgggggtgatttgggcaggagatcgggactgtacaggcaagaggcgaagtgtatggtcgattgtgtatgagttggttgctgatatatcatcaaagggggatgccgacgtggaggaccatgatcgtgaccgtgtgtggtgcggtgcacaccccgaggcgacgcgcttttaataatctagattgaactcgcgaccggcccctgattgatgattaaggataaccactagctatgccggcatcgttaggcttagagggacgcagagagggtggcaaagtgtcgaaatgactcatggatcattcgagaatcaaaaacgagctgcatcattagtacgttatcacatcgtctatggatggcggctatagaccgcgaactgacttgtggagtatgaaccatgtgcatagtcgagatcgtttgtcaaagtcaggggctccgtcaagatagaatgcaaggtcgagcacgcgctgcccggtcaaccctcctcaccagatcacatcgattgatttgaccagcgtgtgccctgaacgaaatccttgcattctcttctcacggtggcacgaacctttccatctcgttcgccaggaactgactggtttcgctggcgtgatcctgaatgacgtttcatcaccgtggagcttgagctcgaggatccattatcaaagagccgagtcgttgtcaacctttcactaaggggagtttccggtcgaacctaggtaaggcgttgggctataacgtaaagcacctgtttcggcttctccatggctcttgttcttcaacatcaccagaagatctggaggtaggagaggaactcgttatgcgctcacctccggtgagatctttcatctcagtaccgtcccgggcccgtccgaagtgctaccgggctgtcaggccagaacctactgatgatccgccgacgctgattagcggaccctcgataagtatccttactgagatttacgatttgcgcttgaactacgattctgaaatcatcccgacaaccggactgaattgctcctcgcaccagcttgttggatcacggttcaaattgggtctggaccggtaggtcgagcggaaatgaggtgacgtcccagatggtattgcttggacctcgtcctcctcttaagcgacgaccagatctaatcaggaacagtttctccgttgcaggttcacgctttcctgagtgtaccatactcgaatgtcgactggtcgcaggtttcaaattgggcatgggaccgtccgaatgtgactccaatggggtctgaggcgcgcatcaccgtgccccgcttgaaaagttgctcggtacttcctccttggagacgatgatcagggtagaggtccagtgtgacagtgacttcatagtttgagcatttggtcgtatggtctcttccagtgtagtggtatgctaacgtgctaatctgtagttgatcctgacctatcaccgtggtaagcctttcgacttgagcatccaccaagcgcgtcgatcgatcgggaaggaacgtcaaagaagtccaaattcgatgacggcatctctcgttgtcggcccaagccagcgcgcgtccgcggtgcgacttttcccgaatttccgttttgcccttctcgtttcggggaaaacggccaaccagcgattggacacacacacacgcctgcaccttgccaaccgtcaccctcacaccacctaacacatcacacacctccttctgctcgcaacgcagagtcacacacccattcgcaatcctagctcgtctctctcgtctttgattctactccccttctgacctctctgatcggaccttgtcgaccatccccgtcaccggaacaaaaaaaaaaagactcgtcccccccgtttgacggaaatctttgcgaaacccaccgcgtaaaccaaaagtcaaatctcatcatccagcaagcatgttgtccaggttggcgttgaagcagggcaaggccgtcgtcaggcaggtgagtcaaacgccggacgagctcggacccggtcgatcgacctgagaaacgtagagcgtactaactgaaccctcttctatcttcgtaatcctccgatcgatccgacgatatagcaacccttccgatccctcgctaccgtcactcccgccgctagcaagtacaccgatcccgtcacccacatctctaccctctcgaacggtcttaccgtcgctaccgagtcccacccccacgctcagaccgcgaccgtcggggtctgggtcgacgccggaagcagggtcgatggaaagaaggcgagcggtagcgctcactttttggaggtgagtctcgagtggtcgctcatcgggtctatcagggcgggcaggctagaggtcgtcgtcgtcgccgaggagatcgccgtcgaatgtctagatgacattggaagaaggcgtccgagccaccatccatcacgaccacgaggacgatgatcatgaccccggcacctccattctgtttgccctgtggacctccccttgtctcaatcgcgagtccctcactgacgttctttccaaatgacccccttagcacatggccttcaagggaaccaagaaccgaacccagcgagctctcgagctcgaggtcgagaacattggtgcccacttgaacgcctacacttcgcgtgaacagaccgtctactacgccaagtcgttccaaaaggacgttcccagcgccgtcggcatcatctcggacattttgcaaaactcgaagctggaaaaggacgcgatcgagcgggagagggatgtcattctccgagagcaggaagaggtcgacaagcagttggaagaggtcgtctttgaccacttgcacgccatcgctttcgccggccagcccctgggtcagaccatcctcggacccaaggaccacatcaactcgatctcgcagggtgacttgcagtcgtacatcaacaccaactacaccgccgaccgaatggtcctcgttggtgccggtgccgtcgaccaccaggagttgtgcaagctcgccaccgagcactttgccaccctgccccagtcctcgaaccctatcgcgctcggacaggccggtcaacccaagaccatcttttccggagccgaggtcaggatcagggacgacaccagccctaccttgaactttgccatcgccgtcgagggtgtcggttggaagtcgcccgactacttccccatgatggtcatgagcagtatcatgggcaactgggatcgaagcttgggtgccagcccgttgttgagctccaagttgtcgcacatcatctcgagcaacaacctcgccaacagctttatgagcttttcgacgtcgtactcggacactggtctttggggaatctacatgaccaccgaaaagtaggtcgcgggacgagcgcgtcgacgtccacgttcgtatgcgaaactgacctcctgtctttgcgtgcgacctcgcagcttctccgtcgtcgacgacttgacccactttaccctccgagaatggacccgcatgtcgctcgctcctacctcggtcgaggtcgagcgtgccaagtcgcagttgaaggctagtttgttgttgggtctcgacggtaccaccgccgtcgccgaggacgtgagtaccgcgcgatcgcctgtctccccttgcatcggatcagctgacgcacgctcgtgccgcctctgtttcgtttatccagatcggtcgtcagatggtcaccaccggcaagcgattcactccccaagagatcgcccgttcgatcgatgccatcaccgtcgaggacattcagcgatgcgcaaagacctacctctgggacaaggacattgccatcgccgccatcggtcagaccgagggtttgatggactacaaccgtatccgagccgacatgtcgagcatgatctactagacgggacagaagggagttggaattgcgagcatgagaaaggagagagcatgttttgtacggtagatgtcattccctcgtcgtgtgcgctcctccttggtaggatatagccagagtgagggaacgggggtttgtgtgtgtgtgcgtctctgtgtgtgtgtgtgtctggtataggaaacgatttcatggaaaacaggacccgagtatcgagattgggacgaggtcgttgaagatcgagttgtgcgaggtcgacatgacatgacatgtcacatcggaagggccgttggccgtttccccccatttttacttccgaagttgtcgtcgaattccgatttggttccgctcgattccgcctttcgccttcatcctagagaggtctttggttcatcatcatctttgcatgcatcttgcagccagatacaattcagctccctcatggtaactcgatcacataggcttaacctacatcttgacaagcaagagaaaaacaggttcgacttgcgacttggcggatctctatacccctcctcaccttcttgtctcggcgagaacattacttgaatcggcagatatcgaccccgctgcgctcatcttgacaagatcaacacagacttaccgttctccttggggagacaaacgatgtcaaggcgagtcctcttatacgttaaaagcctgtagatcacggacttacacgaaatgacgttgtggtgtggtccacgatgcagacgccgtgaagaggcagacctacagaaagccctgcatctttcgactcaaggctctcaccctcaatcatccgtctttctctcctcttcatcgcccatccagatcccctccggctttcgcctagcgtttcaatcggaatcgacccaaggatccgccaacgtccagttctccgatactcacggcagcggcagtggtaccggcagtgcaggcagcgcgaatcctagcacgttcccagggtttcaaggagggatctttgcgggtctacagactcccgtcgtcgaatccgatcgatcgacgtcgatcctgagtccgaccatggtcgttaccgaacgagctgtacagggagccgggtcctcgaaaagccacgacgggtcgaggcggtatccggcaccgggaggcgctttggacgatgatgtggtcgcgggaagcgaagacgacgagacggaggaagaggaaccgtacgaggcgatgcaacggtcggcccacacaggacgttgtgagtataagcagggtcgagcggtcgctctggtcttcgtcgctgaccctgggtgccatctgtggtagcactcccagtaacccctctacctgcagcgaaacccatgtctcccttgccgatccccgcgtcggaaacgatcgagtcgttccctgcgtcatcaagctcgaaccacacgaaaccttcccaccctctcaatcggtccaatgtccctcccaactacgtctcttcgtctatcgaaggctttacgacgtccaactcggacggtcgcaagggaacctcgtcgacagaccctgcgcgcgaaccgcagagagctcggatcgtcctctctgcaccgacggaacatgcacggtcgagacctcagcccaaacaacggcgaaaggcggaagaagccgaggcttacctctttgacccggaggcgctcgccgcatcccccgtgggtaccggtgctgggcccagcaatgcgagtaacgaggcgagcgggagtcgaagtaaaccggttgaaggaagctcgtcaacgagaccagccacgccaccacaacagagcacccctcctcgtatcaagccgaccgtcgtctataccaaacgaagtgtgcacaacaagaagcgaaagatcatgctcagcgatagcgaggcggaagaacaggaaccacccgtctccatcgtacaggagctggcggtccccgtcgacaaaccagaccaggcgagcgcgaaaccagattcgaaacgcaagaatcagagcgatggggatgaccgtccgtccaagaaaaatcgcgggcagggagatgctcgagacgcagataccagaggcgcgcgggaagtgtcgatcgacccgctcgatctgggtcacgtggatccggataggacacctctcaagagccggatggtcgtcgagattgctggtgcgaaacgatcgggtaaggacgttcagccggaacaggacgacgatgacagcgaggtgattgtcgtttcgacgagctcgacaaaggccaaggccaagagcaaacgccgggtcaaggacgatgacgacgaagatgatttctctgaaggaaatccctttcaagggctcgctcccaatgcagctatggccgaatctgacgaggaagacgatttcgttcctccaggccggaaacgcaaaccgcccgccaaggctaaaaagccgcccgtcgaaaaggtaaagaagccgccccgggggaagaaggggaaagcgtcgaccccagctgaagcgactccggcgaccgtttcgactgttgacgagcacactgaagcggaagccacgagcatgcaggtcgacgctgctggtacggcgagtacggtcagcgcgcaggtcgaaccgcccgaagcgatggaaacggccaagatcgggaaatgcagcaagggcaaggctgtgcctgcgacgaaatccggttcgggatctgcgaagagcgcgtcaaccgagtcgaacaggcagcagaagagcgccgagttcatcagtagtgacgaagaagaggacaaggtggtgctcacaacagaaaaagtcgcggccaagtcgacagcgggtagcgagaaggcagttgcggagaagacggacgtcaagttgaagagcaaaggcaaggccgtggtgagcgatgtcgagatagatgaggagccagttgaaaccgtcgacgtaagtcgatttgccgaaaatcatttgactttcctctaaatgagctaccaaaaatcaggtcgaagccaatagcggcaagagcacagctgccgactctaccgactcgcggctcgccgctcccgtactccagcctacttccgtttctcaactgaacgtcgtaaaggacgagacggtgaaaagcaaatcgcccaatttcgtggtggggaaagacggaaagattgtagagtttcggacgagtgagtctttggtcaggcgatgatggaccgttgcatccgctgagcccttatttgggtgtgaatttctagctcgagacgatctccccaaggtcgtttccaacacgggtggggtcaagcgaatgggcatgtctcgctcgttccgtatcccatctctacatcgcaatctcaagacacctcccaaaaggctggctgccccaccgaaaaagccagaacgcaaaaagaagagcgacgacgagtattcggatgaagagccgctcgacgagtttggcagacctaaacctaagccgggcagcaaggaatggtacatgatggaagattagatgtgatcgttgcttgtacaagtgaaagagcaaagctccacataagcgttgtataaaccaagccacagaagcaataatgttatcaccgggtggtgatcatattgtcactaaactactttgcagtgggtggttggttttgtgtcggatcaacctcggaagcagtttcgaccgactcgtaacgagagtagcgacacgatctcgagctgattgacgttctatctggtccctatcacttatatcaaacccagtcagctctctcttcacactgcaacgcattcacgtacgctagcatgaagaggtctcaaacttcctcaccggctccacaggtccggggtctatccctagcggattgggaagccgctgcaccgctcgacgagctcgagatcaccagcgtcgggatcgtgcgcgaagcttgcaatgtccggccgttaccagagaaggcaagccaggctcgtaactttcatcgccaaggttacaaacgagggctgatgatcaaatgagggctctacagtattcttccaacgcagaggccggtccgagcaggccttccacgcctgccggctcaaattcggcagtgttcaaaaaggggcagcccaactctctactccaatctgctctaggtgtctcgagacctccctccagccaagggatctctcggaatgcctcgtcagcttccctttcgaagcagtcatacgtcacaccagcagtcgtctcgaatgcccaacaattccacgaacacttttcgcacctcacttccacgctgctgcattcgcaagactcggcctacagagctcatctcgaagaggtcaaggcgtacggcgaggcttgccgtatggtaggtgacgatctgcaagagtcggaagatatagtagagaccatgatcggctgcctgaaatgggtcgaagagcgaggagaatctctgagaatcgctggggaaaccttgatgcaggaagaggtatgtccgagccgacgaatttcatcccgaactgaacgctgatagacgatcaccttccctcagtctcaactcaacttgcaaacgacccatctctcctcccgattggcgtacttcacgttcctcgaacaagcgcagcgaatgctcaacaaccccggagacgagctcgtattgagcgacggattcctcggcatggtcgaaaggctggacagctgtttgacttatctgaagacgcatgtatgtgattgaagggaaacctgccaaccgtcaagttgctgactcttatttcctcatcagcgagacttccgcgatgccgagatctacctgattcgttaccagcaatgcatgactaggagcatgaccctgatcaagctctacgtcgtcaacgctctgcgttcactcggacaggaagtacaaaaacgcgtcagcgatacgaaggtacgttaaggctcctttcccgttttgcgaaaggcctatactgatgatcaccgctctacctgaaagtaccccatttcggacactgcagccatcgctcttctctataccaaattcacctcgttcgccttcccattgcgccccttgttggctgaactggaactccgggcacaagagaacaccgccgagttgggctccctcttggacgactgccataatgcttggatctcgacgcggaagagcctaattggccctcgagtggagagggaggtcaagaggatggaaccagcaacagcaggtatcatagacttggtgagttgggctacacgcgtcctcgcgatatgaggtaagtactgatagactgcaatttccaaacagactcggtccggctgcggttacctgaagagtgtttgctccgacgaatacaacctgtacaagcaattctttcagacgggcgagaagctggtctagtaagtttcattctggcctccgccaagccaaaagtgatctcggtaggctcaacaattccacgggacagcactttcctggagggtctgtgcgacaatctttacgatcacctgagaccccggatcttgcacgagatggacttgcctacgctttgcgacgtgtgtactgtcctgcaaggccttatgattgccgatttcaacgacgaagagatggatttcggtaccccagcaacaccggacgctggtcccggctcttcatatttccctaaattcggatcacccaacggcaacgacctgaccctccgccgatatctctcctttgaacccgaagccaacattcaacctcacaggccgaccgacaactttcacgcaggaaagctcctcgatatggtcctgcgcgatgttcagacgaggatcgtctttcgcagccaggcggtcttgcgaagcgatgtcggctcttatgctcctcgcggcgatgatctggattatcctgccaagcttaaaaatggtatgtttcgagcttgcgtctttgttagaccgctttcgccgactcgacatgatctctacagtttcacagcgcctggccaaggagcgtcagacctttgctgtatcgctcgatgacgacgatgaagataacccagccttcctacaaatgcccgaaaaggagatgcaggaaacttggtatccttcgcttcgctcaacactatgggtattgtcacttgtgcacacctatgtcgaggtaagggccttgacacacacgggacggaacccactctttacttatctttgcgctttttcctgtagaataccgtattcgaggatctcgccgaggaggccatctcgacttgcagacaatcgcttctcaaggcggcccaaattttcgcttcgcggaggaaagatgccgaactggacgcacagctctttcttatccgtcatttgctgatcttgaaagagatgacggcaagtgttgatatcgtcagccgttctcgagcgggcctaggggatggcggtgtcatcggtgagtacattcgtcgctggtctttattgtacagagcaacttgctgatgagatctttgcttgtagccacgctgagtgctcttttggcgggcgcgctcaatctggttggagtgggcggactgctcggcctaaaatcggaacccgcatcaaggatggctgccactgccaaacacgtcagtcggctatctgctcgttcagcgtggcgatactgactgttgttgcaatgtcaggatgtggatcgcgagctcaagcgtgtgtgtgaagaagcgatcaatcagtgcagtgacaagacgaccgagcccctccaaacgtggctcgaccggtgcaccaaatatctgtctgccaagtcgtcccgaggtcaagcggcagacttgacagcccaggaatgggctactcctgaaaaggtgaaagcagcacacgacgccttccgcgatacagcggaaaagaatatcgctggctggatcgcaagcctggtcgtgtacctgcaggacgaagcgacggtccgtgtgctgataccgcccatgcagaaccacgtcatggacatctacaagactttctacgacgtcgtcagggcagagtatgatcacgacgtggtctcggccctcatgacaccccctgctatgctaggcatgttgaagcgattagaaaatgacgctttgcaaagccggtcgtgatgcgacacgcgaaaattgtatagatattaggacactatgtcacatagacaacgtgatacaacaagacctctgatacagcttaatcataacctttcccgcttcgcttcttgccgtccttgatcttgaagtgcttctttccctttcgagtgggcacaagtacagggttgatgagggattgatcgacgggcagtccgtctgggccgacctgctgggcgtgcgggtaaatcatcgtacgcgagtaacctccctcctgtccgagtccaggcgcgcccttggcgaccggtcgcggcagggggccagcctcgctgaagaacgtgttttcaagatccttcgacttccaggcagcggatcggccaggggcggatgcagcgttctgtctaatcgactttgcggtcgcttgacgttctcgggcttgctgtttagcaacctcggcagcatcaggctcagagggtccgacaaaagtatcggcacccttggcgacacgggtgacgggtgcctttttctttccaagtcggatatcctcctcgtgcttttcaatcatcttgacccggctgtcctccatataggtatcggcatcgataccgggcgggggatgacagaagaccagcttggcgctgacgtagtctttgagtacgtatcgggcggcacgagacgtgtcgggcataccaaacgaggctcgggtgagacctcttgcgactggtgagggcgatgacagtggtaagcggggctatctttcgggcacgcgtccaatttgacaacgacttactagcataacccgacaaaaagtcttcccagtgtacgagaccggtacctccatcctcgatatccttgacttcgatccgaatggcataagtaccctccaagacctcccggggcactcgtcgacagatgagctcgaccggcgcgctgtattcacgcatttggtcgatgggcaagacaccgtcacagaccatgtcggcctcggtatggacgaattgcgggaagaccagaccaggacaatcacacagcgtgaccttgtttgaaaagggcagggtctggaaatgcttggtctttccgggcgtggcagacacgctgacttttttggatccgagcaaggcgttgatcgtcgaagatttaccgacgttggggtaaccaaccagaccgacggtaagcttgtcgggagtggggttgtgctcggtagcaaagtcggaaagcgagggagcgacacgctcgaacagctcctccagctcgagcaccgtcaagacccgagttcgaggatcgtgatcgacctcgtcatcgaacattcccttcatggcgtggttctcggcgagttggtcaaactcgggagtctccacgttcaacttctgggccatctcctccctcaacgcctgagtttcgggcgtttcgccatcttgtcccttcaagatcgactcggccagagcattctggacttccgggtcctcgtcatcctcgtcatcgtcctcaaagtcttcatcatcctcgtcttcaaggtcgtcgtcagcctgggcgacaacatcctcctcctcgtcttcctcttcctcttcggaatccgtttccgagtccatgtgctcggcggcgtactgatcctcggcgaatttgatctcttcttcctcgcccatctgccttcttcgctgtttatctgcctgctcttgagcagcggtagcgttgaaggcggagaaaaaggcgtattggatgttctgagcgtcaaagtaatccgcccaagcttgtctagggaggagggtgaaggtcggtgagaaggctttagtactttgcttgacacagtataggagcggaacccgtcagacgaacctctgcttcttggtcaacagatccgacttgttgatcaacaacaagctcttccttacacctctcttctccttgttccccataccgatcccgacttcagaaacgtatttctccagatcctcacatcggaaagtgatggggttacgaccatcgacgatctggacgatcaagtgagatcgctcgatgactcgccagagttgacgccagacttgcaagtttcgctcaaagggggtcaacaacaaactgtgctgttctgcgactctgcgtttgagggatacgtgggatcgttcagctggttgccatcgagctggcctcggcatagcaggcgggactcactcggcaagacctcttcgccattccaagaagctgtccctctcgttcttctccaattcggctctcgtggtcgtctcgtcccatgcagatcttctcggtacccgcagtgcacccctctgctcgttctgcttcctcgagacggcttgcgactcctgagcgctcagtaaataagggttcttcgaattggggatggaacccgtcgagatgacttttacattcgtcctctctgacatcacaatgagatgatactcatgtcagtcaaggcgtcgacgagaaatgcagctcggtcgaagcgtttgtactgaccggcagtgaaatcggtatcggccagggccgcactgttcaagaattcctcaaggtctccctcgtgcgtgacggaacgcaagttttccgactcttgagtgaaacgaacagtgttgggatctctcctcagatccttggcctttcggttgatgatcgattttccaagaccatggttttgaccggtcgtacgttttgtgggctagggtaaattgattctggatcggtcagaaacaccgcctgtgagctaccgcagcgatatcttcctcaccattttgaagacgttgtatgattcgcttgattacggaagtactgaacgagactatccgatcgattgtctaaggggacttgactgtttccaaggtgggtgaatcacgttgacaacttcataaagttgacctgatctcgctgatcaactcgctctgaaatcgaaaatatcccaaaatcacaaactacgattacgtaattttcaacggcaaaaggggccgaggcggcggcgccggcgtgtcgcctctgcttcaacaaccactttacgacactctacaaaagggaatccaccctcacttgcgctcggccaacctaaagatctttcgcctctttcgactactttgcgtctctcccacatacaaggagtgatcagattcctccgagtctacggccgcatagtccgggtccgcatccgagtcatcttcgtcgtctcctcgcaaatcgttgagcgtgtaattgaccaacatcgacgtcgacggctgtgaggctggtagggcctgatcggtagttgtgtcttttgacgattgagggccggatgatctggtgccccgtctcctcgacgaggacgttgaacccgtgcgtgcgatcgtgccctgcgcggagcttcgcccagctggaggagcaggagctaccggcggggcggctctccccgaattgcccacgccggtaggccgtcgggaagtcgaagtgtctggctgtttcctagtggaagaccgtttcgaagtctgtttcaagcttctcttccaggcagctggaggttgagcttgtgcggccaaagcatttgcgtccgctcgtttcgctttttcctttttcaggagattgaaatcggggctatcgtcaaggcgcagtattcgatcagactggacagggagcaaaagagtatcgggtagggtactcacccgtaatcaaacaagatttcctctcctttgaaaatcttgcgggctgccaagcaggtcaataatcagctcatccagtaacagaggcccctactccttcgagcccatccgggatctcactggctcggatttcaactcggtggttcccctgaacgactttgactgtgcagcacaggcctctgggtaagctacgatcctcgctcgattgcaatccctcttttgctcactttcaggaacgcaattcgattgggcgggatcgtccggactgttgatgaatcgggatatattgcctcgtcgatgcgaatctacatccatgtgcgcgttcaaccccatcagatagttgactccgagcggagcctaagcgtccgtttcgacaggattagccgtgaccggatgacgcggctttgccgagcttgctcacagatattgccctgaggggaggtggtagaggatatcaattcatgatctaggtcttgccgtgtcgtcatgctacttactgccgttttactgcttcgaatgaatccaccatctcacccacatattctgtatcaattcgcgacttcagtcagaccacaccgataggtatttcagccatcataactgaccgataatgagcgaatggttaggaatgtccaccttggcgaataaaccatagccgtgtatcccactgtagttgactagcacaggctggactcccagggaatgccatcagacggatgtacgtcaccggagaaactcctcccctttcgtgacttacctggaattcgccgcttcgtattccgacattgcgacacgaacccttggtccaccggcgaccctcagtctgattgactacgcattcgtcggtcggccgatgagcttggattcgcaaccgaattttaacgaataatcaggtccacagctcgagcagcaaatatcgccagatctactcacctgtatctgcggcctccctggcgccacaaccgccacagaggtccggatcgcattcccttctagccctccagcatggacaactcgtcgtcccgcaaatcaagcgtttctcggcaaagcccgggaccggttcgtatgatttgcatgcacaccctttgtgtcggcgaccgcctggatcgcaaagagtaccgcttcagtcagtcagggcttccgccgatgatcatcggcgatcatcggcgaggcgagcgtttctcgactcacacgtcggagggcatctgcactcgcgggtacaatagtttcgtttcctgaaacactcgcaatcggcagtactgcacggcccatcgtgtgcacaaagtgccatgtcgttgctagtcgtcgtgagatcgaactaagatcagctcaatcggccagcaagggatatccggcccgcagtctcggccatacggtgtcactttcggcggggccagctcgaattcaggagctggtccattaagggcggacgccgcgtcgttcctcgatcgaggtttcccttgttccctcaactgccgaatttgtgtttcaatcaccgaagacctcttgggatcgcttcgatcgggcagaatgtctttggtcttgacgttgttggcgtgaatgatcctggccgccgtcgtgttggaagcgggaatcaacgcggtcgaattatgtcgatcaaacatgcgtttcacgtgcaaaccgagctgcaagacggaacagatgtcagggtgagctggtcagctcctgcgcgtctgaccgcagtgaaggcgatgccgacttgcctgtaaacacgaccatcctttgccgaccggcccatgcgacaagctgaacacgtcgaccaagtcgcacaccttccacgcgtcggcgccggcctctcccggccctggcaacccgttcaaaaaggtttgcaacaagtgcttgtcggcctctcgcatctcttcgcaggtctggacctctagatcccgaggcacaaagtaacactcgttcgagcacttgtactctgggtcggacgaaaagagcaacgccttggcctggagcgacacgttcgagattggcaaataagggactgccgtatccaccgcgtcgcccactgattatccgagctcttcatcagcctttgcttgccagtgatgctcagcacgatccactcgcccagactcacgatgataaggacatgcatacatccgacaggacccattaggacacaggacctcttgctggtttctgacggtcgagaacaagtcttcctcgttgtctcggagttctgccaacgcctcgtccgagatgagcgaatcgctacgaggttgaatgaagatggctcggagctctcggacgaactcgtcagtccgagcttgtcgctccctcttccgtcgtttcgagactccccccatcgtcatcctgctgcgtttggttcgcgtggagacggcgttttcccccgacctcgccgacgatcctgcccgtacataagcctcgatcgatcggctcggcccggtctccaagcgtctcgacgtcgatcctgccatgatgagtgaaagcgccgatggtgtcgtgttcgtgttcgtgtttgtattcgtattcgtattcgtattcatgccgaccatggtctcgatctccctgacttcggaatccgtcgcgctcgtcgttggcgtgatcaccccggtcatgggttctccttctgcagggtcagccccccgccctactccaaccgctggggtcgtcgtgatccccagcgcacccgtatgttgctgctggggcggtagctgtgctagcgtgacctcgaccgcagcctgttgctcggcaggaaaggggatcagatccctactccaataccaattcgtgatctgttcgatcttttgcggcaagatccccgtcgcctgaatcttctggtgtgtcaagtactctgctcgacgtggatgacgcttggtgtatcgttccagccgcgcgaggacttcgatgaggatgatatcgactgaaggtttcgaaggtgggggtcgaccgcatctgatcagctccctctgacggtccgaccttgacgacgacccagcgcgctactcactatccggatcccgatccatatcctcccacgcatgtcggttctcgtaatgtttcccgaaatcctcgtccttcaaatcggtctcgtccggaaagatggggtaaaactgcaagacctgttgctccgccacccacatgatcgaggagacgacgtcgcagtagatgtacggagggatgggcttgacgagcgcgccgtacgtggagaggtcgacggcgagtttggtgagggtgcctttcgtggtcagcgcggtcgctgtggtcgtcgacgccgtgttcgcggtggggtccgggttgttccgtaaagatcgcgccggaccggtcggacgagaagcctttacctggtatgctgaacgcggtaggtaatcgccatgggtaagaggctccatgaacccgggtcgatggtacgtcttgaccttgcgtccgcacccgacgagggacctcggtctggccgctgtggcttggtaacacgttttgggttcgtaagacggggtgtacagtttcgattcgcgcttgaccttgtcgtattcgtttgccgtgttgttggtactaggtccggtgatggagggaggttcaggattgggttccgggtcgccgaggaggagttgcatgggagggacgtccgggtcgatccagaatgagcaggcgccgtcatatgccaaggggggtggctttgcaggttcgtccggcggagcggcatcttcatccatagtcaaatcctcgtcttcttccatggttacatcctcgtccccatctccgtcctcatcttcgccttcgccctggtcggcactgctggcccgccgtgcagccctagcttcctcatcgcgtcgctccctctcctccctttccaacctctcggcctcgtcctgtttcttcctcaatgcagcctgttctaccatccccttgaacctctgcccacattgccgcttgaacgactctcgagaagagacctcgatgtactcgggcaatcgacgcgatcgcggttcatgagggatccgacggtaaaagtcgagataggtctcgttgagcgtggtccggatcttggcccggacttgatcggcgtccatcgtggggggccagacgacctgtcctcgtccgagaggttcgaggtactgtgtgagcagactgaatacgaggatgactggcaatgtccccaacgatatgaacatgtttgaaatgtctggcatgtctggttgctaggtgatgaccggacccccccgggggctcgacaaacaaaacaaaaagggagagcgcgagttgtaataacgtcatttggggatagatgacgtaatatttacgagagatattacgttaaaactaccaaactcgatttccaatcaaaagcgcaaccagcccttcgacctagaacaccccacactatcacactcgaggtggtgacatgcatctattctttatacaaaccccgtccttccaccccttcgatagcaacagaacaatcgttcttcaacaccaacatcatggcacagatccatccttcccgtatgggtctcatcccagccggcggcaacaatggcggtccacccgccccatcccgatcagaacgaagaccgtcaccctcgtatcaagcttatcctacggatcgtccgcccttccctcctaccctcccacctgcacctggtggtgggtacggttacggaaatcagaggggagatttacctcgagacttgcccccgcatcaacaaggtcgaggcgggtatggagggtcaggtagatgttgttcgcgtcgtacttcagaccagtagcccactgttcagcttttttttttttttcaagcagaagacggcatacgagttgagcgctagtctcgtgggctcggagatgtgtttaagagacagtgcttgtcggtattttcagtcggctctgaggactcctgtgagtggcacccatccctttctatcttctcgaatgagaaaaaggtcactgaaccttggcttcgacaggtcctctgcgtcaacaacccgcttctaagcgaagaggactgtgggtccgcggtccgaatgctgatgccgggcgactctccggtggactacaactccccgttgtcgctgagggccaagccaaggacgaggatcccggtcttcactggtggctcctggcccagtaccagttcacccctggcgcctatgaagcgtcttgggtccagcttgaggcccagctcgctacgttccgtcgctcgggcggaacaagctcgaccagaagcggtcgaagtgagtgttccccctccgtcattggtcatacgtgccgttgctgattctcgttgcggaatacttgaacagggcgccttggagaatgcgggtccccttggtgtaggggcgaaagagaagccggtgcagagcgtctggccggctcagaagctcgcccaagtggagagcgtaagtcacgcaacggatctcgacctatcctttgtccgcctcgtactgatcttccgtctgatcactctgcagatgcacgcggccagcgtgaggaagagggtcgtgcacgcgacgagctggacggccggcacatacgtgcgtccatgcgagaccctcttctcgccgggatcaccatcggcaagacaggcggccaagaacaccgaggagccgccctcgccgacaccgggatcaggtcgtaggggcatgggtatcccgagctcgacctataagccgccaccaaagcggttgttagaggtgcttcggaaaccataagggcacgggacggcctgggttttcgggatagagggccggtggtacgggggttgggagagggagttttcttttttctttctttctcttttggtttcggattctcggagttttgacgtcttgattatcgactgtatcactatcacctctcgtccgcttgcggcgtgcagttcttgatcaccgggtctcttgtctggttgtaccaccattatacccttccgtcttgactcgaaccgaatataaaaaccatttaaacccaaccgattcctggcttcgacttgaacgtttgcgaaagacttgcggtgaggagggagattttctagaccgaccgtcatcccagcagactcgatcctgacgagactaatgattcatcgccctccttgaagcgctccacgaattctcgttttgcaaaaacattgtgacccgtctcatcctgtttgaactaagattgatcgcgtgaggaacgcgtcctgcatgtcaagaactttgcaactagtgtctttattcatttcctcgatgtaccggtccatgccacagcaatcccgcttaattcgtcacgatactattcctattcgaacaggccatcgaacccatcttgcatgcgtccatgactataatcgagtgttgttgtatatctcatggagcgcacctcgagacgaggtcgattttaccgtccgtacagcaaaaagaatgccctccgtcaccattgatacattgactgcccttacctcttcgacccgccgtcgcctttctggacgatgctgtggctgattcgaccggcaatactgggttctgggtcggtccttggaggatgacacgggcatctcactgcttgtcagcgtacttttctggcgtgggaagtgtacgcgacgcgaagctcacggccaagtccagcgacatcccgtttgctctcaccctcgcctcggatgacggcgacgcgcttttcaccggcgttgaatcagcctcggcctggattgggggggtttctacccggcgagcgagatctcgctgcatcgtcagccggagtcgaatcctaggtgacccaggtaaactcgtgggcaaaagcgagagaattgagatttgcgaaaaggcatggatcgacgattgttgtccaacgaccgcctctttcgacatcagctttgtgaaaatagggatttatgagccgatagagttatgccttggactttgatccggcgcgataccggcaagactcactcaacaaggcggatgggatcttccacgtcgaccgaaacgctcgacgttgagaggtcatctggaggtcatacctatgcatccagctttgcgcgatattagcaattcatcaaacggccatgaagaccacaataagagaaggacggacggactttcatcatgcggttgtcgaatccatctttttttccaacccggatcgcttatcccatatcacaaccgaagtcgaccttgtgtttgaccggcccggatcgctgttcttcgatacgagttcagcgagaacccgattgaatagggaccgaccatccagtacattggtagatgatagcaagaccgactgagctctgaatagcctagaagaagatcagatgggatcagcccggaccgcttgaagtcgcgcctcgctttcaccttgcaagacatcataccctcggcccggatcgagaagacatggcgaagaagtaaagccactttctctttctttttgggaacgttcgaggaaatgcgaacataccacgatcctccatcaactgaggcttggacgaacaggattttctgctcaagactgtccgcaaaggcttcgacccgtcaaagatctgttttcttgacagcgctttgactgagtctcgctcgattcgctggactagactaagtgacactcttgacgtggaagctgtggtatcaaacggcacgagctatcggatccgaggatttctgcagacctgccgttgaggaagggacattgtgggatcgcccctcgacaattgggatgatgaacgtcgtgcttctgccttctaccggcattcctctgacctttctcgagaagagttcagtcagcacagggcactcatgagccgctttccccgacgccctccgatatttctcctcgggcgagcactcacttggacctgatcgacggacaaccggggacttcgagccggcctgcttctttgaggcacgtaagcccggcctctggtctggtgtcttttgtcgagtcgaagaggtccggagttgagtgacgagctgggagacggagaggctgtggaaagggattgaaatgaagggaggtccgtcatcgaaagatcgaggagaggagccgtcgatcgatcgaacatacttgctttgctcctgtcgtccaaacgaccgtaacctcccgaagtctgtgcgacaaggtttgtcgcccagtggatcacgacgatcaacagcggcgaagacgcacggacgatccatctgaaacgcatcgcttgtggtgttttgtcgccgtcgtcaaaggacccccctttttccggtcatctccgaagcaatgaagatccgattcgagacaagacaagacgagacgaggtgtcgaaaggagggtacaccctgtctgttgtcaaaggagggccagcaatggaatgcacatacgggtggggtaggacggagagagcaggaaatgatttacgtattacgtcaagaccgaagggggagacgtgcagcgcaagatcttcctttccttcgatggtggtggaggtgcaagcaaggacgacgacgacgacgacgacgacgacgacaaggacccggtgacatgtcggatctgcaaatcctctcttgatgacgacgttgaaaatggatcgaggaagagaaaactggcggggcagctggagagtgaatgtggtatatactactcacttatacctcggtcgatggaaatgatgagagatcacttgcctgggtggcgctatacggacgtcgtttttcgatctcatcctcttctcacatcgattactagtatcagaggataccggagcgtcaatgacacgatgatttggaacgcaggaagaacactcacataaacccacgtcgaatggcataacgcacgagtggaatgaggaccacattccggacttgcggcgaacttgaacaacttcagtatgtttgcgtttcgagagatcttctaaacctcggacacgtttgctgtagtcttgagaggagatcaagaccacgagacgatgctagtgatggacagctatgggactacaaggtcgacaacgatacgatcatgatcaccaacaacatcatcatcatcgacaacatccgttctacctcggtcactggcacggacgctacttgacaaagtggaggccccataccatgatcaacttcatcatatgctaccgggatttagatccatgccgtcatgtagcaatcacgacctgtccgacctcggatcctactttgacactcgaccatctacggacatgatcgtatcgacccagtccatccccgtcaaccatcctaccatcgaggacgtgcacattgcacctccgtggacaccctgaccgcctggtcatccactccctcggtgcggtgcccatccgtctggactagacccgtcactctccgaggacgaccgacgcccgacgatacaggaggtccaaggtctccctcgctcatggtcacctgaccctcgacgccaagacgaacgtgctttgtccgttgcgcgcaggaccaaccgtccgaccatttccgtgatctcaggtctgtttagtatagggtccttatcaccgtcttcgaggatcacaagaggtacactcgtcagacagtgctcggagtacatgggaaaggtagctcaaacgctggcgctagttgtcgacttggagcgactgggatccgaccattcttacaggaagaggaagctttcggacagatcgatatgctcgtatacttcgtccgatgggatgcgcgcctttccctggtcagaccctctagacgcgggcacggagctccattttcctacctcctgctcgcattttttttcactctccatgcccatcccccccaaatccccccctcgaggaccctccaggaaaactaaatattctggacccccgggacgcgatccccctctctttcatcgttcacactctactctctttctctttgttcaacgaactcggcctcagcgacttcgactcttcattgaccttaaccaagatctatcaagagtacaaccatcccctctcgatacacaaacacaaacacaaccacaaccacaaacatcaacctccatccctattcccatcccgtttctcgacttccgttgatatctttgtgagtctacctctcctctctttcgatcgttgactcttccaacacaccttaccttagatcgacgacgaccatacattacaaaggacacgcttcctctctcgaagaaccagggacacccgttgtttgtcagtaagtaccattgactttgacctcgaccgtcactggcatcgactgatatccatcttcgcatttccctcttgtacttagaccggacttacatccatcgaaggacacgcttcttcattcggataaccagggacacccgttgttcatcagtaagtactatcgccttcgacctcgttcacacttgacatcaattgatattcatctttgtctttccttcctctgcttaggccggacctatacacatcgaaggacaagccctttgttcggacgttaaggaaacctcgttggactttcagtaagcaccctcgccatcgaaccttgttcatactcgacatcaattgacatccatcttcgccttccttcctttacccagaccgacgacacccacacacgaaggacaagcccttccggatcaaaataaaaaggaatactcttgtaagttccctcgaccttgacgtttgaacttcgacttacaactatccctatcgatcgacacctatccctaccggcacccatccctatccaccgatacctatccctatctaccgacgcttatccacatcaccgactcatcgacccgcacctatagatcaaaatgttgttccttcccatcctcctgaccattgccgcccccttccttgctctctggggggagtctctgctggctgtcagccatgacagcagcttggtcctgaggatgtcccatgtactggttcgtctggtaggagggcaaccggtgttggttgtcacccctcccatgtacgaacttgtacatgtcaccatcgccgtcgcccagcctatgtgcctttggtcggagaaggtaagtcaattatcgtacagatatccgctcccctttctcatcgctctctccctaccatcagcctacccaggtcttcacgatcgactggatcatggacgagtgcaagccgtcggagagggtaagtcatcgcgatttataccgccccgttcgttgtcccgacctgaaacccgacgtctctgtccgcagccgatcgaggacttctgggtcaacgggatctgcggagccaacacgtcgttgctggacacggaaaccgacttcgacatcttctcgtcgtcgtcgcacatggtctccggctccaaggtcgactgggatgctttggtcgcgatcttcgccatggtcgccatctttgccgtcgtcgtcgacaccgaggaaagggagtttgtcatcattggcgacctcgggctttcggctactcttgcgaccgacttcttcgtcccggtccttccggtcgaagctcgttcgttggaggaacccgtcgtcgaggttgtcggcattgtcccggtcgctcccgtcagtcccgtccagcccgccgtctccgtcttgcccgccgtcccggtctcgccctccccggtcccggccctggcccctgcccctgcccctgccgccgctcccgccctcgccatcgccatcgccgtcgagtcgcccgtccagatcgccgccggatcgcccgtcaccgagatcgccaccgaggtcgccgcccaggaattcgacctcgccgtttccaccgctcttcctgtctcccgtcctgctactccggtcgagactgctacggaagagctcgaggtcgcttctacccctctcgtggaatatctcggggcatgtctctaccacaaggaaatcatggacgcttacgctaagtcaacagcgacgttcgtggtttacacgtgtagggtctgtcaggacgacccggacaaggacttcatgtcgatcaccatcatcaaccggggatcgacatcgacggctaacggcatggcacctggggtcgtgatcgagatgcttcctggtgagtaacccgatcgatccacttcgcttacgttgatccacttcgcttacgctcatactcgattcacgtagccgacaagaccgcaggatccaaatcttccaagacccgtcgctttgttcctatgctacaggggcacggcagcatgaccaaaggggtcgcccgccgctctctggaactcctgccggaagggaccactccagaagatcagcggcgactcgcaacgcaacgactggaagacgtcttgtcggacgtggaagggacctgggcccggttgtgaacggtatcgacacctcgacgcgtccctcgaaacaactccgactcgccgccgctatcgttcgccaagcctgggaccagtccactcacagtacgactctttgcggatgggatcgaaagaacgagggacgacgatctcggtgagtcctttcgcgccctgttgctggccgggcgagctgcacgccgcacgacagctcagggtggaagggacagccgatggtcgggattcaatgtgtccgatggtgccagctctctgagcgacccgtcaaggcccggtgtcgtagtgccagctttttgagcgacctgcgataccggaaaccgaggatgcatcgactctcgacctcctcttctttagattcacgatgcgagtttcggaaaaggcaaaaagggcgcggcttcgatagcggtgggttcgcggttatacatagatcgctgatgacttgttgctatccggaaagacgcccgctcactttcccaagcattctctttcaccttttttcgccttgtacattgtgtaaaacatcaccgatacccacattatacccccaataaacgagagttcgaccttgcgctgtggtcgtgtcgacctgatttcgctcgcttagctctggaaccgctcgttctctcgatcggccaagttcagcatatccgccgattgttttacaagcgtgtgcgttgtgatcgttaataagacttgtctcgttacgggttcgtcatgtacaaaaagaaaagagacctcgaccgtgcttgtattcctgtaaacacgttttcatatcgactcttttgtgctctcgccgttcttcgttgccaatccggtcttcgaacccgatgttcgaatcgtatcggcggtcgggcggccgggcaactggttttgcttggaaggtatgacgtccgggttcgtagggataggaatccgatgcagcaggccgtacctggaaagagcacgaacgtgaatacgtctgaataagcgatgcaccggactcgtcacgggctggagcagagcttaccctacgccgcatccgaggataccgcccccaccccattgtcgatttggtacgagcacgatctcacgaaggttactaccatacccgggacagattccggtcgatcagtcgggtggtcttgattacgtgtacgctaagccttgggcttactcgagatcagaggaatacacgtagagccgcaaaggcttgtcgatatgctgtttcgagagggtctcatcagctctgccgaccttttcgtagtgtcctaaggccggccgacttgcgtgttcgactagatcgtaaaagtcggattcggcatgcagagctccttcggtccacccgacgacgtaatctccgtaggggatcagacctacagcacggacataccgggatgacaggctcgtcagcttccaattatcgggatcctgcgctctaccttgaactcgcctgcgctctgtgatatgacgaccacgcatcaaaaggatgagcatcccacggcgtcggaaaagaaatctctgttgcgtgatcttgtagactgacctcggctggacttccttccagtacgtccaggatgtgccatacttgaccgagtccctctgccgggtcacataatcgtagtgacagacccagcaaggaaggttgcagtttattggcccacgagcgggatggtgtcagagtgacgtctttgatcacgaccagggccaccggatgtgggatcagaggatgatcggaaaccttgacgtcgcaccggcacattacgactcacatcgtatcctctgagacttggcgttgtagacccggagtccgatctccttttcctcgttctcttcgagcactcttgccagttcctcgggatccaagctcaacccgatcgcttcctcgtaaatctcctcgtcgataccctgactccggacggccccgctctcccccgtcagaggtctccgtttgagtatctccaccccgatgagatagtcgaaaaagggctggatgccggcttgatgagcgggtgagagttcggctactcggaggacgtgaagcgcgaccgaggggaacggggtcccggacgtcgaagcaccttgacccatgatccacggcgtttgtgttgaagaagagctcgtgagctcgcgggtctccttttgctattggtagaagactctggagagtcgagatacggggtaatgtggcttgtggagtgtcttcgagctgtctatgtcaattcgagtctatcgagctgccgtacagggaggtggtacgttgcattcgttttgccaggatcctcgggcatcgcaagggtagacaggttagggtgacgtggtgagattacagtcagtaagggggttgtttacaattggcggtcccagggtatgatcacgccaaaagcgcatgcgcttgcgagttgatctcggttccgggcctttccctcggcgatccccgaagcaggtagcaggtagcgttcgtctgttcatcatcgtaccagatcaaagcacaacagtcgatacttgctgatcaccaacaaaatcaccctgcttgtccgttacattccaagtcaaaactacggtatcatgtcgcaaatttgcctcgaggtgagtaacggaggaaccgtcggtgtacgatccggctgacttttactaccagatccatgatcttcggacgacactgctctcttccggtatctgcatcggcctgatcatcagctacctccctcaagtacgtcaagcaccaagacgagataaattgaagagacccgtcacaacccaactgacacgtttttcccggtctataatcagtacattcgtatcatcagagcaaagacgtccgagggattctcaccagtaagcctttcgaccccctttatgcgggtctataaaccgaacgacttgatcaacgtcttacgcgtcgtcatcagtggttcctcttcctcggttccacttcgtctacctgtggaatgctcaacatctggatcttacaatggccgaccatccgctgttgcaccgtcatcgtaagccgacgcttccttttcgatatcacatacaccccctgtcacgatgaactgaatccccgtcgtgacgatcagaaagggtctgcgtgtttcgaacaagtactagggattgtacaagtgacgctccaatgggcgtgtttcgctttcctgtgagctcgcagctcgtgtcctttcacgaatccgactgacattccgtcctgtacttgctctcggaaaaggttcgtcctgtacatcgtctactttccgacgagtcgaaagcatgtaaacgccgctcggcaagatgataacgaggagacaccgctagtccgtagagacgatgacaagggacgagccagcaaaactgcggaatggaagttggcggtcatcctagcgtcgacgactctgctgcacgtgtaagccggagctgagggaccggcgagaaagactcgaacgacgcctgatccgcttgaaaacaggctcttcacattgatcgcgaccatcctcatgttgatgctgcttccgaactcgccgcccgctccagcactatacaactacgcccagaccctagggatcatctcggcaagtctcacttttttccagtatgcgcctcagatcagtacgacctaccgcgcgggggtcgtcggagcgctcagtatcccgatgatgctgctacaagtcccggggagcgccatgttcgtaggcagtctgatcggaaggccaggggtagagtggagcgcttggctctcttatgcctttgcggggacgatgcaaggggtcctcttggtgagtcagcgattggtggtatgctcggctgtgtctcgttcgaacagactcaaaccgttcgattcccagttcatgtgcttgatattccgggcgcggcaaaggaagctcggtcaagatgactttggcaacccccttgctatcacgttggaacaagaagacgacatcgaggactagcgtgggatcaagatctgcattgtatgtcattccaaatgaaggtgtacgcaatcttcaatcaaacgtggctgaccgggactctgtacaactgtaaagcttattgtaccttatagactagatgacataccacctttcctggacgacgctcttaacgataaaattcgatcgctactgcatgcatgtcaccgcatcacatctcggcgttcataaagtaggggttgaaagccttgtcgtgaccagcggtaaagtcgataggtcccgcaccacactggggccggggggtaccgggacgtgagcacattcgaggactaggcacgctcgactcgtcggtcgtctcccaatccgatcgagaggacccgatggaaccggtaggcgacatgatcaggccgaacgggacgaccatcctttcgtcacagaggagcggcgacgaagggagactgccgaaatccacaattgaagactgggattggcgcctcaacagcgagggcggaacaggcccttgagatgtctttttcaaggtcgaggtgaagtatccggattgagtggtgagatctccgatagcaggggtccgagtcgagtaataaacgagggaccggccggtcggggaagcgagctcacgagcgtctttgcaggtccatccgatggtttgggccctgacaaagctcggacgaggcgggatcgtgatcatggataccgtggctcgacggaggaccggtggaggagtcggcgcgagaggcacatggctgtcgttcttgggcaagccgagtccgtcttcgatcgccaacaacgagaggaccctttcaaggtcggcctgtgcgtcaacgtgagcttggctaaagacaccgtcgaccgatgtagagaagttgtggctgttgatcgattgattatgcgggtattgccatgcggccatcctagtcttgacagcttgctcaaatgcctcttggttgaagggccagcccagttcgacattgtcgatctctggctgagaagccctttgccccggccttttgttcacgttatcggggtccaagggagcctgaagtccgacttttcgatcctcgaattcgatcgcgggggaagagagcgacgagacgagacaatcttcagaaacgttgctggatctgccttcgataatgacccagtccgaaacgtcttcgcgtgggtgctcgactccctcgagagcttcgcgcgcagtcaaggcttgggcatcctgaagcttgcgatagagagtttccttgaacgatctatcttcctcgtcgttagcggcatcttgaaagtcgatgagcgaaacggaccaagtgctcgaagcgtgagacatctgcaagtcctggtattcgggctcgatgctatcgtttagcgcttcgttgatacgctcggcgcagctgtcttcagcttgcatctgagtgggatgagtgcccaagcagcgactgatgaggtcccagcaagcttcctcgtccatggcagatgcgatctggtccgtacggggctggcgagaagtcgtcgaggcgttgctcatggcaagcgcggtggggcggagggcgcgtataggggtgtcgctttgaattatgttgacacaagtatgcggttttagtcactgcttatccaagacggtttgatgaggtcttagtgaaaacagtgagtagaagagataacgacgtcttttcatcaaccgctttatactagtccggcgtgcaggctgatgaaggatatcacgatctgggctggcgcgtcaaacgcgattcgagcacgcattaggcaatgtaggttaatcagcgcgcaagccctcgtacttcgtcatgagcagcggggtttcgggattatcgattcttgtcaggtctaggatagcgatacagcgaagtcgcattgaagcttttaaactgctgaacgttggcgtttcaaggtgattgcctcaaaagaacactggatcagagtttcgaaggtttcacttcgtacttgctagcaccgcatccgaattattttcccaaaaataaacattttgatgatagcggaagatatcgatgttgtacggcctcggccggtccatcttgttggggttgatttctccttcgcaaccgcatcgtttcataagtgcaagctttgcctgcgggagacatcttaccgcacagacacgaccgtgcaatggtggacaaatttgactaggttgcgatttagtagaaagaactcatctgtctcaaatccactagccgtgtttcaaaatcccgccgatcaagttgcaagatggtccattcttctctcaggttaccgcgatacctccgaatatggagtccgaaacactcattgatccctcctccatgcatgctcgcttcctgtccttttctctttctcgcttatcgaatggaatccgaggacattatgaccaccttgcgatcccgtctagactggcactaacaagactggttccatcttgactggtcacaagatcggtcccgtctgacagtaacaagaccgatcccatctcgaatggtaaaaaggccggtccctcgttgactccccaagaaaacccacccaggtctgattcagaacacaacgaggaacgccccgccaattgaggaggatgggaaaaggaaagaaagcaataaagggccattgccaccaagacagggtggggcgcatctcgaacgagggtgacctgacctgagccttttcgcgcgtgatcggtccgttgccgagatttctactctagactacctagtgttttgtttgtcgagacccttcaactagatgcaaccgtcttgcacttctcgactcttgactcggacaatcgcctctgtagagatttgcttgtctatcgcccgaccatagtctcacaggagggtaccagctttatatcggaccctttgtaacgcatcactcgcgatggatgtaagtatcagcctttgcggtcgccagacgtgctcgtcccctgatcggactacttgcaggtcaacgtctgtccatattgctctggcacaaggctgcacgtcgatgcggttgcaggaaagaaatagtatgtgaacctctcgaagtaatcgtacggtccagggcctgatgctgtcatctcgactccctgcagctgtctagaatgtggtatcgtgctcggggaaatggtgttgaccgaagaggtcgggttcggagagacttcctcaggagcggtggttgcggaaggtaccagactctctgcaggagcccgtaagtcacagatggtttcgatcgtgttgcatagggtgtactgaggtggagtttgtcaatagtcggggtctccttcgggaagcagggcagatatggcggtacatcccaagagttgacagagaccgctggtaaatctcatctcccgatcatcttccgcacccaaccagaacgtgtcgtgcttatcagattctcactctgattaggaaagcgaaaatgtcaggacctcgctatggctatgcaaatgggctacggtcttggggaagaggctgcgcgcgtttggtacctggcctatcatgcaagattcacccgaggcagacgaggtgacctggtcgcggcagcatgtctctatcttgcctgtaggcaaagatcgacacctcaaccttacatgttgattgacttttcttcgaggttgaacaatgtgagccctcgggacttgtcgagccaagcgtttcggctgctaaaagcgagtcaattctgctcaggtcaatgtctttgagcttggtgctgtctatctcaagctcctcaaggccgtccctattaaagatcccaagcccctcgatcccgcaatctatatccaccgattcgctggctatctcgaattcggtgaagacgaagacaaggtcaagatggatgctgcgaaccttgtcaagggattcaggagggattggatgatcgaaggacgacggccatccggaatctgcggagccgcgttgattttggcagcgaggatgaacaactatcgccgttcagtcgcagaagtcgttcaggttgtcaagatcgccgataccacactgaagaaacgtttggaagagtttcagcagacaccggctggtcagatgtcaatctcagaggttcgtcagaggtgggagcttgataagcaggggatcgaagcctttccttcggcgtctgcacctcccattttcaacaaacatcgacgaatcgaagcactgcaagcggaacagtcggcgagagccgccaggcgagctagttcagaggcggcgtccagcgcaggagatactagcgatggccatgacgaggagagcgatgacgatgacgagacccgatcgcgtagaaagaagcgaaagctaaacccgaagaaggacgtgcaaaaggtcaagcgggatagagaggctagtttcgcgccgtcctccagagctgggacgccgcgagcaggatctccagccctgcagcggaactctgaagccggtcctgggccgacgacacaagccaatgctttggcagagcgagagcaggaagcgcaggatgatgccgaagatgatgatgaagaagacgataacgacgtactgaactcggcagtggctgaccaagtcgtaggagaggttttgaacgaagcattggcggaagaagacgttgccgaagcgttgatgaagattgagcacacgaaggaggaggagttaagtcatattcaagacgacattgctcgtcgaccggaagacgacccgctcaagggcttggatgaggatgagctggacgactatatctgtgacccgatcgaagcgaagatcaagatgcatacgtggatcgataccaacatggattatctcgtaaaactgcaaggtaaattatgtccggtagaagatgccttgacgtcgtgcgattactgactggccaagcatacctccagccaagctgagaatgaataagctggacgaactgcgtgacgaagcagaggctgagcaaaagaaggtcagtacaaaatgtgaatcccgtggtgactcggcaggaagactgagtcagagaccgacatgcagccgagaatgcgtcgaggtccggtgggacctgccgaaagcgctgcggaagcgaccaaaggtctcattgagaggaggcagtatagtcgaaatgtcaattacaaggccatcgatagcctgttcgaatcgaatccggatgacgaggaggattcccgagcgggtactccactacacggagtggacgaaaagatggacgagaaaggtgaagatgacgatgagcacggtgagtctagtggcgtcgcaagggttcgatccgacaggaagctgattgctatgagcctacaggtgacgagaagggagaagatcatggtaacgacaaggcagatgattacgacgaagaggaagaagagccttcttaccgccagcaatcgcacgtcgatcatgagcagtgggactgaatggggtgtcggaccctaagagaatggcggagagttaatcatggtgtttttgtagatagtagcagagtagccgcgacttgtatgaaaatatattgcagaagcgaccatcgatgtatctttgcccactttcattccgttcgatcggagacggagccataggcagccttttcggccatgtccgcatgggccatcgatcactaactggtcgcgggagctcgtgctggaccacgccgaagcaggtgatgaccttcactcgatgaacctatctcaagcctgtgatcacgaccacgacgatatcaagctaagactgcagacaggactgaccgacaccaagacgtacgaagatgtcgcacgctagagcgtctactgacgaaggttagcagatgccatcgcgacagcatatggtgttgaaagcgatcgagtggttgagcacgtcatcgctgttcgattatcgcagagacggctcccctcctcgatgctaccaccgatgctcgaccggcctcagatgatagactcgctggaagagccagggctctgacgaccatcgagaaaattttggcagctttcgctttgttgttcctccttctcgcagctgtctttatcggtctatttgccggaaccgccaaccagctgaagaaggctcgtcatcaacccactgcaactcataccgtgcccggatctcatgccactgccaccgtgactgcaacgaagacgattggagctcccgttcccactggaaagcacggtcaccacaacgaaacctgcctcacccgagaatgtgtcctgctagcgagcgaaattctccagaacatcgattcatccgttgatccatgcgacgacttctacaattttgctagtaagctactggaaaactgacatgaaagtatggcctctaaatgagtgagctttacttgtaatgacagacggcggatggcttagcagccactcgattccttcggaccgaggcagttacggatcgttcaacattttgcaagactcgaacaggaagatcatcctcgaagtcctcgagggccaagacaagaagcctagcaaagatgatactcctgccaaagccgcagaaaaggcaaacttgctcaaattgaggaccggctacaggacttgcatggatgaggtcggtcgattaaacgagcgcgaaggctactacgtccttacttacacggattgacttctgcaacaccagcgaggcatcaacaagaagggactcgagcccatgatgcctctgatcgacgatatcaccaacatcctcgggcctttcctcgtttcagaccttcggtctaccgagaccgaggtcgaatgggaaggcacttactctgacgattacgatgtccctgcacacctgatgcttgacgatgcaggtcgacccttcggacgacagagcctgcccaagactgccctcacgggtatggatcttgaaagccgtgacctgcaagacgtgtttggtcaagaggccgaagccttctctaacaagagaaaggatgctctcactcgggctctggcttatactcactctcgaggtaggcaggagcttcacgtatcgagtgacaatttgtagttgacgcgtcttgccgtactaggtgtttcggcattgattcaattcgggatcgagggcgactctggcggcgatgaccctcagattcagggactttctgtctatcaagccggtggcggtcttccctcaaaggtgactaacctcatcgtgctcttctcgaattcgaaggctcacgtcgtgcttttcaggaatactacgaggagaagcctatcctggatctatacacttcgatcgtctcggacgtgctctttgccttatcgcagtataaaccaggcaaacgtgcggagtctaacttctgggggttcccctggccgaaacctaccccccaagagcctgtagacgatgtgaagatccagaagaagatcgttaaagccgttgctaagcgtgtagtgaagttcgagcgctctctcatccgcgctggggctaacccgtgagttcccagccaagtgaggtcactcatacggtttatgcttacttatcgaaatcggcatgtatatagggaggacctcttcaacccacaagttgcctataacccttacgacttccataatctgtcacagcagttggacttcatgtccctctctacctacatctcgaccttcgcccccagaaacttccctaccaagatcgttgttactcatccgccttacatcaagtcggttcacaaaattctcgcagacactccgtcttatgtcttgtcggcctactttgtgacgcgccttggactaggctactcgaagttcctcggacccgcgactcctgtccgacaggcgaccaggaaactgcaagttgtgcttcaaggtctgaaaaagggtgtccctgaggacagacagcagttctgtcaagcctatgcggacgagctgcaaggtctcggactgctcggcggcaaagagtttgtcgaccgtgcctttggcggtgacagtaaaaccaaagccgagtctgtcatttacagttcgtcgatgccgctgctttgtatgaccccacggacgaatacttaaactgagcggtatcacagacatcatcgacgccttcaaggctcgtcttcccgaagtaccgtggatggatgctgaaagcgcgaaagcagccgcgaagaaggtaagagcgaattcacgacccgtgtgacttcgccgtccttacacagcttcataaggcggattctctatatgtcaaaatcggttacccaaccactccgaatactacggatgcactcgccttgcaagcatattactccaggctcgcaattgatggtgacttcttcgctaacggtctcaggcagaggtgcgttctgtggatgttggcgtatacgcatagagctcatccccgctattctcacaggcttctttctgagacccgagactggatgaagctcggtcgttctcgcgacaggggagaatgggaggtgagtcttaacaatcgcaacccaaaccatcaattcgggtgactcagttctcatctctgtgatctcgatgcgcagatgcaacctcagcgtgagctcattgtattgacgggtggccgattgccgagcacgcactgagatgattcctcacaacaacagtggtcaatgcctactacagtcccagcgacggagaaatcgtgtttcctgccggtatactgaggagtcctttcttctcacccgactggcctttgcacttgcaatacggcgcattcggttccgtggctgcgcatgagttgagtcacgcctttggtaagcaaagaggaaaggccgagatcacccctatccaagctgatttttcgcctaattatatagacaacaccggcgcacaatatgacgagcgaggtcgtctgagggattggtggaccaactccactgtcaaggctttcaaggaaaaggcgcagtgtgtcgctcgtcaatactcgaactattcgatcccgggtcccgatggtaagcccgtctacataaacggtaaccttaccaacggagaagatcttggcgattcgggaatcgtctttgcctacaatgcctggaaagaggccgcgaaggggcaacacgatgctcatggaaagcttcctggacttaacttcaccgagtcagtccgaaatcaagcggtcccgggcggtcagcgtttactaaatccacgtaaatctcacagtgaccagctctttttcctcgcgtctgcacgagtttgggcacagctcatcaagcccgaatcggccttgactaggatcaggacggatcctcactcccccaacgagtggcggtccaacggccaggttgccggattcgcccgattcgctgaggctttccactgcaaacctggttcgaaggcaagtccgactttgcccccgcattcaccggtcggttgaatacttatttcaagcgatcctctacttgcccgccatgcccgtagatgaaccccaagaagcggtgcgacgtatggtgaacacgtatatcatgccgtaaagacggcgatcgggcccgttgatccggaagtaattgcttccgtcgcctccgcagccgagccttctcacatggggaggatcggcccacctgcccaaatgcttcaacaaacctcccgctatatatcttgcttgtacttctaccatcgcctgcaatactatcgatcgaatagcttgattagtcttagaatctcaaagagaatatacttcaacaccatgtcttatcttgctacgccctcaagaaactcgcggacccgaacgatcacaagcaagctcgcacactctgtctttttctatgtactttacaggcatgtcgtcctcgccatgtacagacacatgcgtgcaagaggagtaggcggttcattgcacgaggtctacgattacggaaaacaagtaagtaaataatctgactgctgtttccaagctcacggacaaatcgtcgaaacgcctcgcccttgcagctcgtaatcggacttttacttcgactgccttcctccaaacttaaaatagctacagaattgggcgaagcacgtcggggactcgaagccaaactcgtgcctcatactttgcccaccggatcgtcttaccacaatgccctacccaaagagggaaagacgcctgaatggctgaaggaggagatggataggcttttatcgatggagaagggcgatgtcaaggaagggcgtgtcagcggggccgtatatcatgtgggttgcatgcgtctcgggatgacgaagccaacatggctgatggctgtttatcgctgtccgccagggaggagctgacgtcaaccaggtcatcatggatgcggtgtccaagttcgtcgtatcaaaccctttgcacccggatgtcttcccaggtaagctcaatcatacagatgcaagatctgaaaagttctccattgaccaggattacgtaggtgtacggaagatggaggctgaggtcgtgaagatgtgcttgaccctgtgagcagaatgtggttgatccttacgtcagcctgttctcaatcgcctttccatatcacagattcggaaaccctaatggagcaggaaccagtgagttcaaggcactgtataacactcatttcgctgccttgctgacatgatgcgtggtttgaagctacatcgggcgggaccgagtccatcttgatgtctgtcaagactcaccgagactgggccaggaagacgaaaggaatcacggaaccagagatgtgagtctcaacaatcaggtattcgtaacgaaccgtctcattaacacggaaagcagcatcatacccgcttcggcacacgccgccttctggaaggcagctgattacttcaagatcaagatccacgtgattccagtgaacgacaagtcgaggaaagccgatgttgcgaggatgcgccgtgccatgtgagtgtccgcaacccgcgcatgagcagaatatatacctaacctgatactttgatcagtaaccccaacacgatcatgcttgtcggatccgcgccgaacttcccagacggtgcggtcgacccgatcttcgatctcggccagctagcgaagaagcacaagatcggcctccatgtcgactgctgtcttggcagtttcttgatgccattcttgaagcggacggaccgaaacctgcccaacttcgactttactgttgacggtgtcactgctattagttgcgatattcataaatacggcaagtcttgatgcaatccgccccacgatcgaggactaatctcaacagttgtgatgggttacttccaggattttgccctaagggtgagctgtttacgtgccatgcgacttttgggttaaactcacttcatccgatcgatcaggctcctccgtgatcatgtaccgggaccgcgaactccgcaaacaccagtactacattcaacctgactgggccggtggtatgtggacacttgacaatatcccaatctgtttcgcgagtttaccgaggccatttcttcacacaccaggtgtctatgcctccccatcaatggctggatctaggtgagctccgtgtgatctccagaataaaggcagtcagacctgaccagactctccccatgccgttccaaagacccggctcgattatcgccggagcatatgcagtcatgatgcatatgggcgaagagtgagtgagaaacatggtgtcagctagcttacaaagctgaccattcttgacctacaaacagcggttacgcccgcacctgcgaacagatcgtgggcgcggcacgcaaactgaaattggccatcaggaaggactttgccgacgatctttacgtcttgggcgaccctctcgtgtcggtggtcgccttcagttccaagacgctgaacatctacgtcgtcggcgacctgatgagcaagcgcggatggcatctaaacgcattggccaacccttctgctctacaccttgccgtgactgtgagtccagacaacggaggcgagcgtgtcgaaattccaattgatcgctttttcatctctcagttgctctctgtcagcgccatcgatacgctcctgcaagacctgcgcgaagtcatcgacgacgtcaagagcaacccgccaagtaaagatggcgacctcgttgcgctttatggtctaggccaaacgagtgtaggaaagccggtcgtgcctctgctcgcagagatgtttatcgatacgctctacatgacgagatgatctgcgtcctcaggggaagccatttcattgctcatcaggacccgctacactgaggacaggacatgcttgtaatctaggataaccatcttgcggaaaatgtacacgattcaatttactaagctttgtctatgcggattatgtcatgtacactgggaaggaccacgatgcaggatccgctacttttgttctaatgatgatcgcttcctcggtatgccttgcctagcaattctggcgccgacctggttcccctttcactgcaaagataaaagtgtcgacgggattagacctagtagttggagaccttatcatacgagatgctcacatttcgtctagagccttcatgaggtcgtggttgatctcgtcgcttacgacagagtcgtgtttgtaagccgggtgcgaggtgataaagttacggatccaagcagcaggcgtgcaaagttttcctgcacaaccccggaaagatcagatgtggctcggaaagcaggcgcaagggtgcgatttaccttgagccctgtgcttgatgaggtccagataggttcgaatctcgcatcgagtgacgtgatcgacattgagcgagttcaagtaggcgttgacgactcccatcaaaccggggaatgaaccctacatgttgccatcggatcagcacccactctcaccggtgagccgcgaatcgaaagactgacctttccgttgatgatctcgtcgatcgtcatctcttcgacttcgtcgcccgatgctcgaggatccgcgtcctggttcgaaccagttgacgcaggtgatgacgagcgagactgtgtcccgtgggccgcagcgccatccgccctgctgtccccgtcgaacgcggctcgcgatggcgaaggcggtcgactgctccactcatcgtgcgagggtgatcggccgagagggaagatccattttcggaaatggaacagctcggatcgggaagcgtcccgtttctgtgctcgttgcatgttgatgtccacctgtatgtcgaagaaagcgttggcgggcatgatctcgtcatcagagtgtctcgctctcgcttaccttggagatgggcatgtaaaagttcaagttgaagcttaggatcgctctggtcaacaagacgatgaacaccgagtaggcggcgttttcgaaatcggtgagctgaacctccatgcttcggaactcgaccctccaaccgatgggcgaatcgacgggagggggtttgaaccgcatcgtctgccaatttgtcgactgaatgttttcaaagtgatccatcgacgtctcgtcgtcctggtcgactcgctcgctaaagacgacgagagggtctctgataaagaggtgggcaatgtgtttggccaacgcgtcatcgatgcctgcggaaagaggacacgctctcgtcagactcagacgaggcgaagctctccggaaccctggtcctcaccattgtcgagcaatcgcttgtggatcgcctcgtccattgggcaatcgatgtcgttgtaatgatccttgtttcgggggtctgacgagatgtatcggtcgaccgaatcgtatctcgatttggggatccggaacttgtcattcttcaagggctacgacgtcgcgaatagacatgccaattagttttggcgtacatagtgaccctcgctctggaaacgaggatgccgagcacgcactttgagacccctctcttcctcggtccgatcgtcgacgctcgcggcgatcacgtcccacctggcgtcgacgtcggccaagtaacccctaaacgccgggctcgccgccgtcaacgccagcatgataggggtgacggggacgagagcgtcgtagaccctcctcgcttcgttgacgttccacgcctggaacgtgatctgaaggcaacaacatcccataccaaaggccatggcatccatatagatgtggtccggtttcgctgcgccctttttggcctctgcattggcggatcattcgaatgtcactcgatcagccccgacgatcgtatcagacgagatcgaccctacacctgaactgaccgtcatcccccgggtacctctgtctatcccacgggatcgtcggatcgatgaacggactaggcgtttcccgatccttgaagatgggcacgttgatggccaccttggctccccttcgactccggatgttccccgtcaacgtcgggaacctcgcgtgcgggttcgtcaccccctgtccgacgaacagacttcgactggcttcgctatctgcttcgctccacgcctcgggaacggtgaacggcgtatccgtgaccccgagccgggggtacgaggtgatcgtgatggggaactcgttttcctttaaatggcacttggccagtttacgtcgaaatcgcatgttttgctcgaccgagacgagatcccgcaaggagcccgagtagggagcgcccggggtggattcgagcatgtatcgaccgtattccgggtggaaagtggggacgaccatgctgagcatcaaggtgaagcggtcaggcccgtcacgtcgtctgtacgtacgatacagggagaatcgaagcactcaccttttttccggctcctcgtctttgaggtcgatgacgacgtttttcagctcttccaggatctcggactgtcgtaatgagagtagagcacgtttcgacccgtcctcgggaaaggtgatgaccatgtactcgatctgaaccgtgcgtggcatggggaaggacgtcagatttcacaagtcacccggtggatgaggaacggtacgagatcagcatcagctcgacatccctattcggaaagttgagaaggggggaggcttgaaaccaacctcgtcaccccacaagaatcccttgccctccttgacgtccttccacctcgcccaagtatgcaagaattgcgtgatcccgtgatcccgtacatggtctgccagaagtttcgtctcgtcccacgagagtggggtgcctaaggataagagacccatagtctagcttcgagagaagaggtttcgagaggtgtatgctttccggtcttgccggtcagggggtttacgagaagcgggccgggcttgtaggtatatgtactgtatatgcagacgactagttttccgaaaatatacgatcgatcctagaggtaggtaggttgatcgatttgatgtggtttgtaattcgacctgtcaacaccaccttagttggaggtctggatgatgcaaagggtaatccggtcgagatcggccgatcgaaacaaaatacgcgcgcggacggaggaggattatgtcgacgacgtcgatgaggttgagcgtcggtttggacaattcgtgctgacgtttgagcagcaatttcagtgggtaaatacctgtccgtatgcacaagtatcgacatatactatcgaattgtgatggatgtcgtccggagttgtcaacccgaccgaacgtcgtcgttacttttagagtaacgacgttaacgacgttggctttttcgaagtttgggttgggttggtcagccggaatcagccatcgtgcatacatcatgagatgcgcggggttgaccgacgcaaccgcccgtcgacgtcggacaagcactcgtacatcgtcaaccgagggtacatcacgccatatcactaccacgaaacagatcaacagatccacaaatatccgaacggaccacgatcatgacactagtcgacaggaccgcgtcggttgcgatgcaaaaacataccaagaatgtcgacctttagggcgatgtcgtgattgcgcgcgttgcagccgacccgagattacagagtcagctggttgttttcgggtcgaaaggacgatcctgaacgctcgtccttgtctttcgagctttcgatcgatcgcgtttcatcatagaggagttgatagaatcccgggacatgacccggagagtttgacgatcatgggccattcgccagacatacatgactgcgatcttttcagggcgcgagtagctatggttggacgatgcagagccacggcgtgagtggcatcctcgcccgtcgaccagccttgcttgtcgcactcgtcaagatctcagggtcgttgaatcgaccattcgttgacagtcctcaacacaagcgacatctggtgtcagtatgtttttgagcttcaatacgcacacagcccctgtcatcagcttgcgggctggtgcggcgatgaatggcctgctaatcggtctcgtcgctgaccaccgtataagaccgaccggcgtgcacttacatactctaacacctacctatcatcgagacacataccacatgtcctattcctagcctgatcgtatgactcgtcgtctcctcgcttgactgcatgcgtgactctgacgggattgttcggcgtttgttgaaagttcgaatcgatcctcggtctgacgaatcgcgcgcaacgaggtgcgacttgaccagaccttttggccataaataccctggtcgcattcaattacactgtctgcaatacataacgatgcgagtcgctccaattcaatcccaccagtcttccgtatctagatcagcttcaaaatcgaattataccttgtgatcgagaatcccaagatggaaacgatcagatccgtcaccaacaccatctccgaagcagcctcgtcggcgttccaatcgtcctacgatgtcgccaggaaagggttcggcgagggtaccaacgagcacgtgagtcgatagtcaaaccaggcatggtcaagaggagatggttcatgttacttctgcttcctgtgtttctagtacgaccggtaagcagctcgagcgagagacgagacgagctcgagtcgaagctgatgtccacctgggggtctctcagtgctcgcccatcctacccagccgaatccctgcagtacatccacaagagcctctcccccaccgctctttcccgtcccgagggcttgaacatcatcgaactcggttcggggaccggtctcttctcccgaatcctcctctccccacccggacccgagtacccttcatggaacatccattcattgtacgcggtcgagccttccgaggggatgagatcgcagtggacgaaaaagtacgaggacctcgtcgattctcatcggtttgaccccaggcgggtctctggggaagttcagaccctgaatggagggttcaccgatttgtccgggttgaagtcgaggttgagtgggaggggggaagaggggggatgggcggatttggtggtgatggctcaggcctggcattgggctcacccggattacgatgccgcgatcgtaagccttctcactgcttcaatgaagctcctgctcgctgacgccgacaccgctcttcagaaagagatcgcttcgatcatgaaaccggacggcgtcctggtctttatctggaacaacgaaaagtaagcctagaagcgatcgcgtgctttgtcgtcttcgtctcacctcgacaccggcgcctaccttccagccgtgaaccgccttaccctcaagacctgagggctttcgaaatgtcgctcgagtccggcacacctcaacaacaccgagggctatgggaggccactttcgacgcccctagttatcccgccaacttcaaggaggataggggcgatcgaaatatcgtacactggaagtcggtgcatgacgacagcaaggtcagtcgaggttgcagaaatcttgataatcgtcaagaagaattcgtctgaccgatggtggtgaccgtcaaactgtagcggatcgatcgggtattgtccaagtcctacgtagcttcgaggtccgatcaggaaaaggaagacatcatcgccaagatcaagcagatccaggcaaccgacgacggcaaggaatggatcgaccgcgaagtgagcacgtacaagcctggatgcatacgtggttgtcactaattgtcgatctcgtcactcccaggccggaacgtattatcaaccctggtggactctggtcgtcgctatgcaccgcaaatgattgcaggtataggttgcaagatccctatattcgcaaccatgctgttatgtccatgatctgtacaaatatgaaacaagacgagtcaaggagcccatctatatgctgccacttcgcatctataaacctgccaacactccagactcgttgctaccttgaacggccccgccgctctcgatcactttccatcctacaggtccgtacacttgcgcctcactgcctttgacccaaacccagtcgtcgtctttgtgctcgagtacgggctggaccgtgtaccccaggctctcgtaatccagctcgtccacgatggccgtgatgaattcacggacgggtttggcgatccatcgctgttgagggaacgctcggacgcgctcgatcttgtcgcccgtcttgaccgtctttgtcccggcaaacaagggtccatcgaaccaccctagatgcccaccgtgtgccgtgacggcgagcatgacgtggctcgaggccgtgacctcttcgatcggcaaggcggctgaagaaacgtcaaacgagagaaacagagtcagacccggaccggatccgtctcagcagagtagactcacagccatggatgatcggatcgtcaaacgagttgatccccaataacggtcgtcggaccctcccgatgaaccccttggagctcgcatggtgataataatcatcagcacccttgaaaggaaagacccctccgtcctcctttctcaaacccccaagtttgctagtgatcaactcgtcaaactctctcagccggagatgtcgaccccttttcttcagcctgacgacttcgtctgacaattcgccgtacgggtgagcgagatcgtactgctcggtagggaggacggaaagtttggcgagttcggccttggagaggaactccttaggggcaatgtgtcgtccgaccgtccgggcgaggttttgacccatcgaggacgaataaactcgggatgagaaccaaccggtctctagcctggacgagcagcgagtaagtatcgtcagcgttacgtaccccggacgtaggacgacgcaaacgtgtgcgggttttactcacacttcggacatggcaggaacatcccaagggcaacctagagagatcccgcccttcaacaaacaaccatcgccctgctctcccatgtatcgcgccaagacacctgcacctagggagaacccgagcccgatgagcggcgaggcggggaaagaagccgccgtttggtgcacgacggtgttataatcccctgtgtacaacgccgaatatgcctgttggctcgtcaacggagacccggcgcatcctcgatactgtgcgtttttgaaccgtatgagcctttgaaggtgtgtcgatgcagaatgtagagctcaattcggcgattcggactcacgttggcaactactccacgtccacccaagccaccctcgctgacagggcggaccacccattcgagtacgttcctcacgtagctctcgtggctcccgccagtaagaccgtgggcgacgacaatggtgggcgcgtcaggcgggaggtcttgatgatggggaggagtaatatctaccgcgctaaggtgggcgaggaggaaccgtgtcagggagaggttcgctcgtgattgagcgcggggtgatgggctcacatcgtgcctccatctcggactcgtagcaatgtccgttcgtagaccaccttgtcgataatgttgaagttaccgaccacacagtacatggtctgcaagtgaccactaccaaaggcgaatcgagggtgagtgctgtcagcgaccagcgcgtctttctatcagtcgcggatgtgacgcttactttctgatccaccacgatggcgtaaaagtccctcgcagactagagcatctctccaggatgaactttcctagggtttctgcacccgcttccccgtttcctgctttactctccttggagcccccatgcccgttcgactggccattcccaactatctgccgggacttgcccgccttgactcccctgactgcgaggttgacagctgcggtgggcaagacgtgaacaatctggcctgatgtaggtgcgagtccgaccatcgaaaagatccaggtccaaaagtgttcgagcagaagcgctatcgattgaccgagctgcgtcatgccgatcgcggtggttgcgcctgcagagacggctacttgtagagttttgaagagatcaaagatgaaacggttcgccagtccgacgatctcctttctgtgaactctaatacttttcccttttccttttgaccttttgtccggcaactgccatcaacaacgttgcaacaacaacgtcatcgaaagaacatgatcgctcggtaaaaagcgaagcaagcgggggttagtcccacggccgccggtaaaggatcacgtgacgcgtgtcatgatggccggggttaggatgatggcgcattcttcaatcgacctccaactaagcaaacgcttttcccgctccgcaagtgatcaaatgatctttgagcgagagagaacagaagactcgaaaagctatgttggtgattgcggcttcccacgaatttaccatagcgcggaccaagtactccagaccatacgtatacagggcattgatttgaattcaaatgcgaggccctgtgagggtacatcaagctcatttggccttagagtcatcgagaccatgcccaccgaatctcattttactgcgaaggaagtaaaggcagttgcgtggatgacctacgatcgaccgatcatctcactgactttcaattctcgccgcaggttgacagtcacatggaagagagagagagagagagagagagagagagagagagagagagagagagagagagagagagaaaagccagagatccgatggatgtcaagaattcgagggactgtccatgatcaagcgttgacttggggtttcgttctcagctgaccaaagccaagatcttgaaacgttttgccatgaagatgcaggatagcaggcttcgatttgcccggtggctttctgagagcgagagatgagtgctcgtccataaagatagtttattcaccacgtaccagacgtaggttcgtacaaggttgttatcgataccacattttatatagatccgagcccgccgctcttataccctcatcctttcatgccttcaccttgggacgcgctccctcaacgtcctgctccacactgatcggaatcgccgctgaatcgtctctctgcctgctgccgccgctcccatacattgcaggcaacggcctggctttgaaatcccgactcggtgtagccggtctttgagcgagtgtgggatcccgacgtaagtccgccgaccggttcgtccgatgaggggtctgatataccaagatcgcgggtcacttcagctaccgctgcataactcgtatggaatggtggcaactcgccccgggtcctagactccacagtccgtctctcaagctcaatttcctccgatgccccggtgtcccttcgaaaatctcggcttccctccgtttgatctcttcgggagtcaaccctgagaggcgggaagtggagcgtttgtcgatcgtcggggagaagtacgaagggtttttgattatcgtcacgcggaggtcagaagagcgggtccctcgcggcgtctatcagacgaaccgatgggccagagagtcagtcgacagcacaaacatcagatgtgtcgtaaaacgagggctcacgatggcaggtggcttcaggctcgcaggaatcatcaccgcagacctcctcttgtcccttacagaagtgccatctcggagccgaaccttgtctcctggagtcgctgtgctcggatttccacagccggtctcgttcggtgagcattgacctcttgatctgatagcagccacagagattgggcgtcgactctcggcacgagaaggggtgaggacggttcggttgggagttcgcggttgatcgccgggaagagaagagttcagccgggctagggtagacttgttcatccgcggctgaatgaccggttgacgcaaggatcgcaaggccttgaaagccattatcttgttagccgaggtattgagaagtcgtcacagagctggcgtgttgctcacctttgaattcggcgcaggtcgtccgctcgtgagctgctcgtgttcccttgctgatgaccccgacgttccctctttcttgtcgtcctctccctccagtatctccgcaagcacaccatctacttgattagcctcgagctcgctgatccgaggtctgccgacggtcgaggtggaagagacgattctcatgttcctctgcatcctatcgatcaagccatccacttcttcttcctcttcgcccgcctctttgctccccagcgaatggcgaggttccaagccttccgtcccgatagaagtatcatgctcgagctcattcgggatcgaaggaccgggccgaaagcggccaagctgggcagtgggggattcaacctcggacgagtcgaatgtcgtcgagatgggcgaagaggttggggatctcttgaccgatcttctgttggtaggggtggtatactaaatagaacctgtattatcaatgattggtgagattcttgcaatgatcaggcaggcataccattctgatggacggtcttgtcgatgttggactcctggagttggctgaggtgatcgctgtacccggctcgctcgagattggacagggcagactaatctctgattgggtgtggctacgatctccttaggatgatagatcaagacattacggacgccgatgtatgtatgattgctgttcctacccctctgattgtccgtggtatcatatatctcgttcgagctgaccatagtgcccttttgtttacctttaattgggaattggaattgatgggcaacttcggtgatccgagtcgatgatgaggcgcggcacggggacgaggggaaggaaacagcgaattcgcttccgtgaccaaagctgaaacgatcaatcatcaaggggcagcggtagtattagaattgatctccacaacgaccggtgtacggctacccgcagacaaaacgtgcggcgttgtagcggatcgccagcgtgtatggatccgccagaatgccgatgtggccgtctacaggggagccaaggacgaagctgggatctctttccgggagagagttctgcataggctcatcccagtcacaaagggtgagcttttcgacagtctcggaaacgtcaactctactcattcacaaatggtcgaccaggacggggaatagaccgaatctcagggctgctgcgaagcgtcgaggtgacggatgaggagcgcgtttatatggcgccttgatcggacccgctggggccgtgtggtcaatcatcaccgcttctaatatatctatcaggaatgatctcgctatcaggtatacactgctatacaaccgcacttcccccttgcccattctctcggacccgcctcgtccctaaacgatcatgacgaaaacagggcgaccaagtactgagagatggccgtggccgagatggtacccagatcggtgatgaccaggtcgacgagttctgggccggtgatatcgaccaagggattcttctcctccatctccctcgtcatctcccatcggacgtcgtagcccggagcggtattcgccaacgcacccgccgcggtcccgcccatgccggcgaagctgtctgacaacgagacccgacgcggggtggcaggcgccgtcgtgttcgatcgagagagtttcgaacgggtattcccgcgcggtccgcgacgacccgcatccgtcgcgtcgtcgtggtcatcgtcgtcatccccttcgtcctcgtccaattcgtcaaactcgagcggtatccgtcttccccatcgtttcggcatgggcagatccgattgggtcaaggggtaatacctcaaaaacttgtaactctcggcgagcgcgtaaaacggtttacccatggcccgggcgaggtgggcgcattgcgacgtgcctacccgtgagacgagcccgccggattcgactacggcttcggttccgacgagaacaatgtcgacgcgttcgaggatgtaggcgatggccgaatcgaggatgactgtgcatgggatccctgcctgggtcaagatctggtgggtctttagactgtggaatcaggtggaggagggtttgggtttagcgactccactcaaacactctcccgattcatttttaacgagggatatacacgactcaccccaatccttgtggtcgagcctcggcaacgtaaaccttgatccgcttgttctgcttgtgagcctttaacaacgcctggatgaccgtcctcgagtacgagtgcgtcaagatctgttctccccgaccctcgaacggtcagccgcccgtccttttcgataggaacgtatctctcggctcagctgtacttaccacacagtcatccctcaagaacccgacggcgagctcggcaatcttatgcctacactcgggcgcggtgacggcgcagaacgaacgaccttgttcgatcagcgacctcttgtgcgaggggaaatcctgcacgcgaagaagtagatgatacgatatgaaatgggatggttggactttatcagctcccgttaaatgacgaaggcggcgactctggcagagtcgactcgacccgacctgacttgactcacctcgcccgctccactactactgacgaaccgttcgaacagctgacacccggctctcactcctaatgacggttgcgtgtctaccagcttttgacgtgctgagactagttcggtgaggagtcccgtgagggtagaagctgcaaggcgatgataccggtgatgatagatgaagatgcggtcaggggtctgggtgatcgcaggaattccaatgagaaggtcaaaggtgggagcttaccggttgatacttccataagctgggtcaatgcgaggatcgcagcgagcggatgtggaacctggaacagcatgtaggcgatcggttgattagccatacgacgtctagcccggcgtggtgctcctcgtagaaattcgacgcacctgctcatcgttcaacgccctgatgtacgctccatttacgtcgaaagtctctgctgccatgctctgtaccgattcggctcttttgggagggacgagcgaatgaatggaagattcgagggattcgggttcgtcctgcggggtagggttgggtgattcggtgatgacgcccagtgtcgggggaaagatgaggttcatgctctcctaccggaagagatcgagtgttttgtttttgtaaagggtaggtgatcgcggtgtatggtattatcttggcttgaacatgtcagcaaccactaggttagtagctagcttacctgcagctctactccactatggctgttccactcgacaaggttaaagtcacgtgatgacacatgatccagaggcgatgccgtcatgttacacgataacgttttaacgtaatttcgaaatgccgtcatcacttcttcggagatgccgagctccggcgaggtggtcatcaccttagaacctcatatgcctcatacatcagtacatgatggtcgtaatcgaacacattattacctatgctagcaggcacgaacctcgtcaggagtgtcaaggttccacaaccccaagacaacaacctcgaatctctcgatccctggagaccatccgcccatcatcatgtcgcacagtctccggaataggcgcatgtccgagtttccacaacaacccaaagacgtcaccctcactacggccacgttcaaccttcccgagctcgccgctcaactgcctcaatcccacccgatcttgtccttccagcagacgagcagtaaaccgggagtcaagagacaacaaacttatgtgaggaccgcggacgcgcagagggaaaaggaaaagaagaagggagagagtaggaagagcaaggtcggggagaagatcaagaagaggttgtccatgcggtgagcatatcctcatcttgagctcgatcgtgatcgggaccggaacggggactgatggagctcacatccgtcttcgaaccgaatcacagttatgccgaaccctcgccaatgatccccgcacctcccgtgcctaccctccgtctagacccttcctccctcctctcccccattcaagaaccggggtccatgagctcgacctcggcattcggcaactacgctttcccctcctcttcatcctcttcccgtcttcctgctcatccgcgtgacgggcaggtcttggaaccaacgagtagggaggaagagatggtccgtcctcgcgggagcgttgcccctggaggttcgttcagcgaatccggagcgcaaggaggggcggggtcaagggagaggtgggacctggatggtctgaaggaagacaagatcgaggtcaatgcttgtgagtctcgagcctggacatgacgactggaatctgaccgtagctgatacctgagggggatgtccggctcagtcatcaagaagacgttggcaggggcggaagaggacgaggtggatgatttcaagcaggcgttgatcagacgaaaagggtccaatgcgcaagaggtgagcctgggcagatcaagtatgcggtccagatctggacctgctgacgccctcgtcattccggctgttacagctcaagggtaatgtgttcaagaagtaggtccgaccgtactcgaatcggcatgtccatagagcccactgacgagacatgttcgatcgaaccgcagctacgcacatttcgtgacgatcgccaaagagatcggcctgctcgagaatgacatgctcgagctgaaagagatgctcaccgagtggaaacgcgcgccgagcttgctaggtgccgggaccggcgccggtgatgatacttttggagggtacgagctcgggaaagggtcgtcgggcaacgtctgtgagtgcccttgccatatcccgcgtcgaaagcgagaatttcccgtaactgaaaatcgctcgccttcagtggagaggagaaagacggtcaggaattcggtcctcgacctggaaaacctctacaagaaccaagttcaagccctctggacgcaaatctctgggtcacaaaagtttctcccttacgttcccggccgtcacctcatctgtgaagcgtctaattttgtcgaacttaactcggccacgtacaaggcgaaacaaacggtcgagctctttttgctaaacgacttgttgttagttgcggtacgaaagaggaaacgaaacgagcccggatccagcgccaaggataagggtcagaataaggaagaagacaagtcaaaggggaggttggtcgcggagcgttgttggaacttgaacgaggtcgtcgtcgtcgacgtcaaggacagcggaggtgagtcgatcgactgtcgtgcacgaggaaccgtccttgaccgttgcttcggactttgcgtcagacctgacgaacgccatcaaaattcggcgcggtaaagagagcctcgtttaccgcaccaactaccccaacgacaaacgggtcctcctgggagcttttcgaaaagtggctgaagacctcgccgccaagaagcggaaggagagcgaacgcgagcaggaacggagaaagagcatgtggacaggcgatgtgagtggctcggcccccaccgctgcagctttctcgaccgaatcgagagactgatcatcgcccctggcactggcagatgacgagcatgaaatcgggcgaagtgccacctgtcccgcgcatgcgaatgccaactgctgaagcggaagaaactgatttggaatggctcactacgttcgaagacgatctgacgatggccatcgccgtacgtgattgggatcaggcggtccagttggtcaagaaaggtcagtctcactttcaaagatgtccactgtagttggtcatggctcaatcagagcgctcgacccctcagggaaaggccatctagccgctcaggtcgcacgtgaatcgcctaaacatgccctgacatcgcgcttgagcaagatggaaaaggagctagtcgatcaggttgcttatgacctctcgtacccggacatcaagcgatcgtcatgcgtcacatgcgtcgctcatctcgtcgacctcggtcaggcacagcttgccagccaaaagttcctcgccgcccgtcgcgagctgttgcagcagcgtagccgcatgatctcgtatctcggagatgtgccggcgtacatcagcgagctgggcgtcgtcatgttcaccatcctcaagcatacagccgactggtacttgacggcgttcagggagaaccgcatgatttcgagtgggtgcttcctgtcgacctcaatatcttttactggtcatgctgacaaatcgcttgaatgacaggtctggtcgagtgggccgaggtgcaggtcaagcagtttgccgagacgttccggcgtcaggtttacggtccgacatcggatcctgtggtcattgaagaatcactaagaatcaccgcacatcacaatcgcaaggtgagtgggatctgaatacccactcgtgtgctatcgctgacctaccgatgacctcgtttttcgccagctattgcgggactccggattggactttacctttttgctggccaccttgcttcagccaaactggaacgaaccggacgtcaagcccaacccgatcatagcagagaccgaggtacagaagagtcaaagaccgccgaatccacgtcaggaaaccatggagaggatagccaaggcggccgtgcccgtgccatcgttacaaccggtggatgaagccgtctatacttcgactggtgcatccgatattccccgtccgccgcctcgcagcgaacgacgggcgcgtgctccgtccaagcctgaaagcagaatctaatccgatcggccggtatctggattgcggcgatatccatagacgaggtagaaccgccgtccggtcaagaagaagggctctattatcgagatcgtataccttgtacaagcgcatcatgccatgccacgcgttacatcgattctatcgagtcttcttgctctccaattcgacttgcttcccaaatagcttgaggacccttgcttccactccctctccggcccacacgtacatcccttcggcgatggccaggttgtccgcctcggccttgtgcagcttggccatgtcgggtttcccgggcgccataggtcccatcgcagcacccgccatcatcgcttgcgatcccatatctcgcgaaccatcggcagctgagtcgtcggcgagacggtcagcaattgcgaatctcacgaggacaacaatacacaatgccttgactgaccgttttcggatccaagcatcagcttgaaaagaccgttcagaccgaacaagttcaggaagtaccatgatagggcggatacgtatcgcacgtccatatcgggagtagcaatgtcccgttgcaacatcgccttgaagccataggtaagggggaacggtaatttgactggcaccatcgacagcagggtcagtcggagtcgcgatagcacgtaacgagcagcacgactcactgaggacgaaacccgaaaagaacatgttgatccactgcatgataaccatgttgggaatcatcatgacggcctgcttcttcagcccgtccatcatgccatccatctggctggggtccatgagcggattgaccggtgcgtccggcttgtcagggtcttcgctcaggacgggcttgacgtaggctccggagcgcagggcggtagcgagtgacgtggacatggccgtgaatgctgcgggaggtattgggcacaaaggcacgctcgaacgaagcagctgcgatttcagcatggctcgcctggtcaagcaatccagatcagcggcgggtcaccgtcttcttggggctttggcttactgttccttgacttccgctgctggaagctttttcggcgccgagttcaagagcatggtcacatagtgtcgcaaaagtccgactagaatctgggtgcacatgggcttaaactgagctcgagaaaggtgcaagccaggtaacgaaagcgacccaccatgactagcgtgatagggaacaggacccagtcctggagcaaagaacaacaacattctcagtctcaggaagcgtcctcataccctaacgggaagagcttacacggattgcgggatcgaggtacagagactgtctgttaggtcaggtaacgcgggatcgtcactaagcgttgagaatacagcacgaccattgtaaacttacgtcgagaccggcatgactgatggatcctatcgattatgcgctcaaaggctgaagctctcgtgacagtcgactgccttgacagcttgatcgtcaacgtccattacaagatctgccatactctgatactctgatagctaacgatgaccacctagctgattgaagacgaggcatttatgcgttttcggcgtttcatcgatcttattcgttatcgcgtcaccgctctcggctcgtaatctattccatcagagtagtgttaacagacaagaatataaaaacgtaagaacatagagtcacaacctgaaccttctcgtgtcatgctcaacaagtatcgctacgaagaaaactaccaaagtcatccaatttctttggatattctcataagggtcgcgtctttcatacagtagctcgccattcttcacaggtggtctcccttcctttcggctctgcgcgaggcacttgagcgaatccgaccggacgcggtggcatcgaagtgatgaggatttggcgcatctccagggccgatttcagtatagccaaattatgagcctcgagtccgcacagcggtcgcgctggacctgtttccgttctcgatcggcctttcataccaggatgatgcctcgaaggacggaaccccagctcgatcttgcagtcgatcgcaaagtccagcaagagagagacggctagatcaaaagggttcgataacctcgcgtcgtcaggatgcatctccagcctgacctttctgaggttgctgtgagcgggtttccacgggacacctgttttagacagggtatgtaaccatctcgccgagttctggcggctcctctcggtcccgttggaggaaagcatgtcgtaccacggtacgcacaggttctctaacccacacaatcccgactggacgcatcctaatacgaacgcgttacaaggatgttccgtacactgatgccacgtcagctcagtgagctcgacacattgtttggtaagtttggcggcgaatagaccgttcgtggggtcgaagtcggaatggtgttcgatcggctcttgaatctctgtcgatccgccataaaattccaattttcgtaagcgaggtgccctcgctgcgagtctcaagaggtcctctccgtcgagacagaatccggagaaccgaaattcgaccacgttatccagctgcaattgttcgaagagcatcatctcctcggctgtcggttctgcttggcttggaggatcccgcacagctttgagaggcggtagatgctctactccgactagcatctgttggcaagcccattcccagccgatatccgcactgtcccagggcaagagcagctgggccgcggagagagacgacagacggcattctttcacggaccaggccggccgtgacgagtcagacaggcgaagagtgatccatgcctcttctgtcccggcgagggaaggtatctcgatccctatttgtatagtctcgagctgagggtaccagacggcgattctttcggctggattcaagtgtgccacccaggctcgcagagatgattttgtagtggtgcaacgaagatggcggaccgctagacggtacgtctgccaacgttccaggtcgcagaagttgcgagcgagatgaaactcggtactgtcgtcatattcccggtaaagccactcgatggcatctcggtgtatttctcgaccgagggtagcacaccgagctaggatcgtcgtgtctgcgtggaagaggaccagtgatcggagtatagggatgtgaaagactcgagccgccagtatttctcgcggcgttcgtatgcttttgtatgatctttctcagcttcggctggagagggggcccaaaatcaatgacagctcactcggatgacgtctcgctcatgcttggatactgtcttccaggtcaaatcgggtgtctgtgtcgtcacgctgagatcagaatcaagaaggccgagacgtatcgaagatagtcattcattcaataatcatcttacggccgattcgaagaccaatcgatcagtgattagtgaggaagccctcgtctgctttttgtaagaggcctatgaggtcaagccctctgttcggtcatatccgatgatggctcgatgactgtttcacctcgcaagtccccgcgcgcttgcccgatcgataatcaatacgatcctctcacgatctcgcaacatttcgtcagcgttcattcggtgttgaagagtcgttattattacaggttgtatggtatcgataaattcggtccgttaggtatgttcctcaagggaatcaaatcgattcacacccgcaggtgggattgtgacgtatatatatatacctgtacaagccttcgatcctcaagactcgctctcacatttccagccaacctgtctaggttcctacaacctccgggttcccccttgatgtacggcgatcagcttgtcgcggcgtcagcgccagttggcttatgggtcggtcctcgagatgatacgcactcttggctagatgcgctgttggcctaatgccaaacggatatgcattacaccataactccggttatatccaaggctgtcactatacccgattgaatagactgatcggacgctgcgcctggatcgagcttcagcctgggcaggacctcgaaagatgggctctaactcaatgatactgaacttggattccagtgcattgcgatctgccgatcgtcggtgcctcgaacgcggtaacaagatgttgtgtcgcgaacagaggtaaaattctgctggaaacgcaataccgtggcgtgaatatgcaacatcaaagaatctagatatattcaccagcctggtcatcggtcaactcagcgacggagagagcggtcgagtcacatcacttgcaaatcgatcaggattcgaggggaatctcggcaggtcgattgccagaacaggtccgtcggccgccgtccgcgacaggagtagagacaaacacattcatcacaccttttcaatcggtcaaacactgaccgacatcgccaagccagccctcaaggtccaatatcctcccagcaatgaagcgtgcagaagttctatcgtagggtgtcgtcctttccctcaaccgtctcttcccccttttcgcatttgtttgagacatcgagatggagcatccttcagataaggccatgtcatttcgcgatgttctcgcttcgttgctgtctcacatatctgctcccaaagtgtctccacggccggattctccgacctctgggttgtcactactaccggcctggagtattgaaatatgctggcgtcgaagactttgctgataagatgcgactcagtgatggaactggagtaagattaaatcccgcttcgatagcccttgcgtgtcctcgacgccgacgacgatcgatctgtttttgtaaccggatgaatgcagagtcaaacacgttccgcaaatcgcctgcttttccaatgtgtcggatatagcatcgaatacacgcaacgaaggcgtcctgtcgagctctcccggcggccccagagccaatcaacgattgtccatcagaatcgagtatgcaaaggtatgcagcgtgaatgatagtcattccggacagtctcattgtaccctagatctcaaaccaaatgacaatactgcgtcggatcgcccacaacctggacttcctttttggtatatgtgaccgcattccccaggccaatctaggcgacgagaggcttgatagcgtagtaggtcgcaatcaacatgagagctagatgacaagtcgttacggatgtcagctttaagacagcaaggatctgggccatctaagctcctgctcacggtagtaggagaggattccgagcaaaccacctctggtgatcctagcggaaggtccagcgctgatgtacccgagggtgtacaagatccggccgaccaagtacagaccaccaagggaggcagccaagttgggagcgtagagacctgtcgagatggacggatcgtcaaaagggtacgggttagtccgcgatcaaagtagacgggagggatgtacgagcgagactgaccggtccagaacaatccgacgaggaaagtgggcaagttctcgagggtgttggcgtgggctatgggtaacagatggtcagacaagattaatggcaatgcagcagtcgattgtgtctatatttacccctgggggataagaatgagtcaccggatcagcaaaaggtcaacctcgtctccgagggattcactgagatttacctctgagcacagttgaatttcatggcgatctggctagccttgacctgctcctgagtggccatgaattgggggtattcgataccggcctatccccgtcgaccgatcagtattccctagcacagaccggcttaccacacgatgactgagcggaacttacgagcttcctgtacttgccgacctgcgaagcctggaacaggtttacccaaaaggtgccgactccgacgaggccgacgtaaaggtagttggcagggagggtgaggacgagtccggtagagttggaagcggcagcgaacatggtagagtggttgatttcaagcgagaaagttggtaaggtagataccgacgattgctagtgataggttcgagaacagagtggtcgtagctgttccgttgatgtgttgggattgcccttgcgaacatatcattttatatatacttctactacgttaccactctgtccgtactcgtacacactgacgcggatcgcggtcctcggcaaactcgtggaggttcctttcgtgtatttacatccgagatactgccggattagtaacgtaacggtattatcatgttgtcatcaatagtgtgtcactctttcttgggcggctgggatggacggatggtatgaacagactgatcaagtcgtgtacatattgcacgacgataacttgagggctagttcaagtaatgagatcgatgaggtgtaaaccttcgtcgtatcgttggccctgactatgtctggcatgtctggacaagtgctaaagaagtgtcaatcaaaaaggccgacagagccacgcgactttgattgctcgtgctgctgcgcgaggtcaacacccaaacctagtaccgagagatcagtctacagtctgcttgctgcttgtatcgtatctgttgaaatccaccttgggcccgggtacacacggtgatctatatgcaatcgtcagcttgaaaatacttctagaattgcaagaatagacaaaggtccaggaagatctgacttgacgcaatctttgccgtcttgaccgggaggaaggagatcaatcaactataaacgcctagattacccattcccgacatgcctcccgattttgaagacgtgtacgtcaaccctttgcggccggctgtaggtcgtagctcaacgcacaatttggaaacagtctgacgaatcagcccgtcgtcatcgacaatgtgagtcgcccggcaccgacctgtccgatcggtcacgagctcgaccgttgactcttggccgtcccgttaatcgtactcgctgtagggatccggcacgatcaaagccggtttcgcagggcaggaacaaccgaaatgttactttccaaacttgcgagtctcattccttgtcatcctctgaagacactggaattgtcgtgctgatacggtcgaggcatgctgcagtatcggtcgaccgaaacatcccaagatcatggccacggactttgacgagaaggaggtttatatcggtcgaagagctcaggaattgagaggactactgaaaatcaaatggccggtggagcatggaatcgtcagtcgacactggcacaacagtggcttgtcacagtcaagctgatgaattcgacgtcgctcggagcaggtcacggattgggacgacatggagcggatatggaactacgtttaccgggagggactcggcactgcctcagaggaggtgagtctcgtgagaccatttctgactctgtccggctccctgactggcgcgactctaccagcacccggtcttgttgaccgaagctcctctgaacccccggtcgaatagggacgttgcggcccagatcttttttgagcaattcaacgtcccggcactgtttaccagtgtgcaagccgtactcagtctgtgggtaggagcttcggattccgatcagtcttccgtgtactgactcttcacgttatacgtccagctactcgagcgggcgtacgaccgggatcgtccttgattcaggggatggcgtgacacatgccgttcctgtctttgagggattctcgatgccccatgcgatcagacgggtcgatatcgctggacggtatgtcgcctcggttcaggagctagagcggagcgccagtatgctgatgacttgatcgtcggtcatagggatattacggacaaccttcagctattactacgtaaatcgggtcactacctgcatacctcggcagagaaagaggtcgtgcggacgatcaaagaaaagacgtgttacatcgcgcccaatttggcaaaggaagacaaggagatgttgggcaggacggaagaatttcgattgcctgatggcaaggtcatccaggtgagcgaatctagccgttcccgggttcaggctggctcgctaatgatccggcgggatgtacgaagctcggaagcgaacgatattgggcgcccgagatcctgttcaaccccgagctgatcgggatggaagatccaggcgtgcatcaggtaggtccaaacacggctatcttcggccacggttctcttcatctgatattgatctcttggttggacgtcggataggtgattgtcgactccctgaatcggacggatctggacctcaggaaaaacctgtatggtaacatcatcctcagcggagggtctaccttgtgtcgaggtgaggatagtaacgcgagcgacggtcggcagactttcgattgctaaaacaaactcaatcgaattggcgaactaggattcggtgatcgactactgaatgaagtcaaaaagatcgcactgaaagatgtgaaattgaagatatatgctccacccgagcgaaaggtgattgcagacattgtgttctttaaacttgcatacgctgagtgttggtcgtctttgcagtactcgacttggattggagggtccatcctggcaggtctgggaacgttcaagaaggtaagttatagcccataccccgtgtcacatggaattgtactgaagtcgctcggcctgcgtagatgtgggtctcggccgaggaatatcaggaggatcctgacatcatccatcgcaagtcattctagacgagtcgttctagtcctttatatacatacagcctcgagcgtgatgacgaccctgataatgacatccatgacgacccgacctttgcgcccgctcgacctgatagttactgcgatgcgcgtctcgggccgagcgagaggttgttgatcatttgcggtaccgagataagggaacctcagagtagcgtcggcatcaaagtctcatcgaccggaccatcctcatgtcgaacaattctagatgtacctagtcttccaagattgatttcaaccacccggcaagcaatagctcatcaatttacattgctttccaaggctcgattaccttttaaaagtctagcctggaacgctcgaccagtgcagatgtgaatgacgtgaccaagctgtccatcatcgctacgacaacaatccaagcgattttggatcacgacaagcacgagtactggacgatcatcacagttcagtcctacaccaattatctgtgtggcatggtcagcgcttgatcagctcgtccaactttctggaagccagccgacttccccttcagcatgtacggcaatacaccccgcggcggcccgctcccgtcagagatcggtgatctgggaggtcagcaaacatttcctaaacgaagccctgaccagaaggaaggtacaagctccacagagctccggggagatgctcaggatatcgagtacgatagctttcttgatgtgacggatgagacccgtcacaaaggggcagtacgatcccgcaaggaaactctcaaagctcgcaattccaagaagacgaagcccgagaaggggtcctatccaggtctaccgtcctcgaactcggcagaaggatccagtatgggacgtgcaggtagactgaagaagaaggcttccaagatattcagcacgaaaggcgctcggagcgattcgaagcggcccgacatgcccacaatggactcggcgtcgactgcggctggtttatcccgtatgcagtctcggtcgactgggacatctggcgagaggcgggacagcttgacgacgacttcatccgagttctccatcgcctccgctcatgaggctgctgctggaccatcctctcacctatccttgtcccctccctcgcggcgctcttcacactcgtctgctcggtcatcagcccggtctttcttcaagaaccgtcgcagcagttcccagagggaggaattgccgacattgccctctcggcaacaagcgccatcgcaccttccgctcactacgaatgtccctctcagtcagcccatcccagtatcatctagtgtcctggcggctcgcaaccccggcggcaactcgctgagagattgggagcacggagaggattccggtactttcaccgatgtccccggactaatcactacctccgctactccaggaccaccagctcagagaggagtcggggcgcaaaacccttccgctacagacggtcaaccccctggtatcggtggcagaatgacaaactggttcgccaacatcatacctggcacagcagggaccagtggggtctctggcaatgcggtaccgggtcggggaaatatgttcacctcgaatccaggagacacacgggcttccacacggccggagtcgctcatgtccgcaaactcgggacccattccgacatcgagttcggctcctggtcgagcgtctttctcgtccgtgcccggtgacctgacctcctcctctgtcaacgcttccacagcctcgcctggtcgaaagatgacatcgacgacatcctttttacaagccgctcggcagaaggcagccgggatgggtcgatgggttctagatagcgaggctctacccgaaggtaatgaaccgatatggattcttggtgtagagcatcgttacgacgcaggagacgacaaactgctagatttagatgcgagcaatagcgaggaagggtcatggggccgacagtatgctagcaggaattcgacaacaacctcgtcggggagtcccaaatctaaacatccgcaaacgaaacggggaggatcgccttcaccatcctcgctctcgaccaattctagcaattacttcagtagtcgaacagggatggcgatcggtaacctcagtctgacgtcatcacccagcaagaaaggcaaaggtgctggaactccagacggggaaggcgtccttggcagtccaggtcgaggcatgaggtccttgttgtccatcagcaaggagaaagacaaaccatcaccgactgtatcgccctggccagacgaatgtaagcacgcatgttgtacgaaacgatatactgtgctgaccgacaagcccttggcacagtcgtacgagattttcgatcgatcatctggtgcacttatcgtgctcagtatgctcccatactttcgcttccgacggagatattcctgcccgatcctaaagcttatctggaagctcaactcccacccatccccaacgagccacaagagatattgatcccctcatcacaacccggtacgaacaacggaaagtcaagctggtcttgggtttccagcgttggagctggtatgggactatcttcgggtgggacagctgaaagaggcttgacatcggatgctggttggggctgcatgctcagaaccgggcagtgcctgctcgctaacagcttgatccggcgtcatctcgggcgaggcgagtgtccgtccttgctagagaagccgaccatgcgctcatgtaccgcgtgtcattgcattttgtaggttggcggctaaaagcggtatcgagcatgcagagtccggagacagccgagtctggaatccttgctcgagatgaggcttcctatcgccaaatcatttcgtggttcatggacgacccagccgctatctgcccattttcggtccatcgcatggctctggtgggcaagcagctcggcaaagatgtaggagagtggtttgggcccagtactgccgcaggcgccatcaagtgagtcggaacaccctagacgttcatttgtcgctgcgagtctaatcacaacttgatacaggacccttgcgaatgcgttcccagcctgtggcctcggagtatcggccgcgacagacgggatcatcttccgttcggacgtgttcgcggcttccaatacggaagatagccagtggtcttccgtcataggaggattgccttggtccgaccaacctcatcctgcgcaagggggtttcggcaataaagccgtccttattcttgtcaacgtaagactgggaacgaacacggtcaacccgatatactatgatagcctcaaagtaggtcatctccgagccaaatatcatcatgtccgaaggagtttttttaacgcgattcattcttgataggccctttttacagcaccccaaacagtcggcattgcaggtggacggccgagctcatcctattactttgttggcttccaaggtgaatctctattctacctggatcctcatttcactcgccctgcagtccctctgcgcgggcctacgaccgagcgaacggtgcaaaaccaagacttgcccggggcggtccccatcatgaacgcttcgatccgttcgcacaagtcgccgaacttgcgttctcgtgaagataacgcgacgtggctggcctctgcctacacccctgaggaactttccaccttccactgcgatcggatccggaagatgccgatgtcaagccttgatcctagtatgcttctgggattcctgatccaggatcatgatgactggcaggacttttgtgcgcggatgagcgctgtgagtaaccaaactgttcggtttcctggcattgcattcgccttgctgagtctctcgttgtaggtccgtcacaaaatcttttccattcaagagcaacccccatcgtggagcgacgatgacgacgaccctggaatggaaagcatgtcagaaacggacgatggcttcagtcttacttccgatcgaagtgcaacccattcgccaagagcggtacggcgggaacagagcgtttccatcgattcagatctcgtgataacagacgacgaatccgaacttgtggtttctgtaccacccacacccacgcgacgccgactacgtccatctgcaacagaaacgaccctcaatgctcgggccatgatggatgacccttcactgcaccccttgtcaccccaattgccctcaaccgtaaatcagcctctctttgattcgtcggccgtcctgctaagcaaacccagcctcggcgagttggccgcctttgacgaggagcacggggtgatgataatgacagacacaccaccaccagcattaccgcagccatttgaagatggacctcggacgcctcaagacgagaccgtgaaacgaaagtagtcagccttcctcttcccgtaacgacaaatccaacgtttacgaatatcctttcttctcgagcggcataaattttatgagctgatccgaggtaccgacgaaccaaatctgagaactcaagttgtatgcatcgattcttatgggcttaattgtaggagattctcatgatgatcgcacgcttccgaagatgcagcagtactttttgagataacttcagatctcaacctgtagtcatgccaatgggctcacgtatctgctgcgttggtatttcggcagcaaccctcagattcatcgtcgtggtcacggtacaaacaaaaagactcttaggattcataaggaagagcaagtcaaaatcgtccatgttatcgaaagcgatcgtccatgatttttgagcgggcgtcgatctgtgccgccagcgtattttgtcgccgagagcctagtaccagccggcagaggaactggaagaataggaggagtgcatcgagtagctttccggataggcatggaatgactccgagtagttgagagcgtgatacagggcagcgtaggcgagcttcgagctctttgtaccgcagagttgatcagcgtccgtgttgattgacacactgtatttcatcgaagatacggtacctcggcttctacgtctggacctgtgcctagtaggagctgcatgtgtcaatcatcggaccgttcacaacaggcgccagtctctgaccttttaacgcgttgataccttcagcttctgcttgtactccgagctcgatatatgtcttggcttgaatttcggtacgaaattggttgagattccggacgaagctattggattgcaggtgagtcgtcatggagatgtgagttgtcgtggcgaatgatattcctacttgtgcacgacggcatattgcacagccaaagcgacgtcttctggattgtcgcaatacggagacaacagtgcctcaacgaagtgttcatgagatcagattagggatgacctcctttcgactcacctgaatttacacttccaccatcatcgacataaatccaccactgctgtaacagattgaggtcgagactaggaaagtaggtttgtgcggcgtcgactacagactgggaaggaccactgcgaagatagtctctgcagagacgagacaggctgatcagccactaaacgtgagatagaaagaaaggatcgtatgaaacgggagtggcgcacggatgttcccttcggaaaaacatgtcggggccgttttggtattctcgatgtatcgtaatgctgttatattgctacagtattggtagtgatacaggctgtgttgaacgtgccgagtgagttggagcaccacttgaaacggggtccgatagtgcgagttgcaagtcagcgcactaattcttgtggaatcggggttgaccttatatacccgacacgggtttcgggccgaatcgaagcagaattttgctatctatcgtgcctaccgtgtcatcgcaaatggctcaaatcagaaaagtgatcacctggatcacctgtttgttttcctgatcgcccattcccccttttttccttgttcgggggcttcggagcaatccacagcgaaaacattcccccaaaacaaaccgggttgttttcgaatcggctctgtcgggcgagtcacaaggcgagattacctcctacacacggctggtatcacactgaaccgaatgatagccatcgtgatatctctcaacccgggtgggttgttgcacacgacctggcccctgcgtcgagtggatctttgataatggctttattgagtttctccgtcgatcctcctttcccccctcgaacaggcttccgtccggaaactgaggagcggaggaggtaatcaggatggatcgtgatccctttgtcccttgagaccgtcctttggggtatcgtgattgaccgccatgatcggaaggaatctcgtaagatcagtcgcgcctcccagacacgataagatacccgagttcgagaatgagagatcggaagaaatttctatactacacgagtacatctaactcggcatctttgcaaaccatttcgttcaggtcgaaaagacttaaaactttgatgatgcaacatgcacgaaataatggggacaattgcacgggtcctttccattccactgcgcagagtctcctaccgagagaagatccaccgatccgagcggaaagggtcctttggatttaggcgcaccagacgacccacctgatggcgctcgaacaggtcggacctccgctgtacttaataaaataatacagtaatgtgctcacctgccacaggtccgtgcatctatcttctacttcccgacttattgagcgccacgatgaaacgctcacctgatggcgggttattagcgggacattcttgtcacgcgggcggtcagcttgattgccctggcaagccgtcgacaatgtatgaattctcgtcagacacatagaaaggtcagagtataagagggagcgagcatacgttgcaaggcatctgtcttattcgcgtctcatgtctcatgttccctcgtcgctcggtatgctgcatcgtttctcaaacagcaagatcgcaagatcccctttcgaccggaagaatatggcacgagaacggatgttttaattaggtgacgtcatgaaatttcgtccgccgcgcgttaccctgcaaatgccggcacatgacttgttgttgccatattcgaagcaaatgacgcatcgggggcagaggtggcagggcagggcaaccgagacccgcgagattgatcgacagagggtcactcactcgcactcgcttgccactcgccagcctccaatatatataccacacctgcctgtacttcaagacacccatcacattgacctgatcattcgcactcgatatcattctgaacgttaaatccatccgacacattgacgcccagcacagacctggacgcacacgcatttatctaaacaacaaagccagccgataacaaatcaagatgtatgtacaccattgatcaaacgaaacctgccctgcacgaaggctctgatgctgatcagctccaacgctgctctcaggggtctgtttcacaaaacccccgaagagaaggaggagaagattttgcagaagggtaagccgagagcgatcaggacagcattgttattggagagctcaacgagacctcttccggctttttcaccatctcccatcgaattacagaggccaagcacgatgacagtgccgtcaagcacgctctgaaagaggttgcccacgccgaaaagaccgagcaccatacctccaaggtgagctccagaaccatgcctacctggccttcatttcgaagaggaagctgaacatcacgatgctgtgtcgtacccataggagcacaccgctgctatcaaagcgcacgccaaggctgtcgagactgagcacaagctcgccgccaagctcaacgatcttcaacacgagcacgaagcggctttgagccgagagcagaagttggccaaggtgagtgtctgtcactttagagtcttccctgtgggatggtgctgatgaaaggggggtgatatgacgttgaccgttataggacatccaaatgaaggatcagcatcacctcgaggctgagcagactattgctgccaagaagaaggctctcgagcaggtccagcataaggtaaatttgaaccagtcgcctagtcctgtattcgttcgtcgtcctaatcctagctgtgctgcgtgttctagcacgacatcaacgatgccgctcgttcggagaagctgcaccacgtcggaactggtgccgtcggtaccggtgtcggtggtaccggtacgggtgtcgcccccggaaatgccgggtacgctaacgagcctgtcggtacgggtgtcgctggaggacctgtctacaccaccggtgctcccgctgccactcgatgagcgatgtttcattcgatgattgttgcctgtttttctatcgacgcctcttcataccaccgcgaagcaatcgtatgcatcctgtcgattcctgtagctccctataataatgttaccgtcgtctctggaatccgcttggggatcaaacctcttaccctcgacagaaaatgaccatactctagatcgaacattccttacggtctgcgattgagcttacctaatacgcttatacacgcggttccgcgcgcgagacttggggctcgccgccgtctgccctcggtcgtcagccaacatcactcatcttgacccatcgaccactcccgttattcattgtcatgccattgatgtacatttcctctcatttgctttgcccacgttccagacacaagcttcatctccaaacctagacaccttctcggatacgaaagtttcactcgtacccgactcttcgcacgtttgcgcttcgatctcgctggcagtcagctagaaaaagcaaagccaagcgtctttgtgggaatccgtggcgttgaagaggtaagtcgtactgctcgcgatgacatggtaacgatttcagctcaccctgaccgcttggatcactagtgtactcgcctctgcgtcgtatagaatactcatacaggaattcagccagcatggaggtgagtcgggacaacattcctcgctgggtcatccaatattccgttatcattaagtcggttgctgagctgtcaccctcacgtctcactaccaggccattctcgacttttcccaagacctggatgtggccttgctggatagaatcgtagcggccatgttctcggggaacagacaagaggcaagtccaggcgttataggatctggaacattctcatcgagtgatcgcgcaatcttcgctgggaaccaaagctgacccggattcacctgatctatcccattaccatccgcagcaacatttggctcaacaagttctcactcagtttcaaggtaggtcttggtctttcgggtcacgtagccgacgtatttgctaacgtcgagcttcgaataatcacagaacaccctgaagcctggagccgcgtacctgccattttagagtctggttgcggatcgcagaccaaggtatgtgccctttttgacgctagactcgtgcaaggaaccccttctgattgggctttctatggcatcacagtacatcgctctgcaaatcctagaaaagctgattcagacgagatggaaagctctgccagtcgatcagcagcaaggtgagcagctacagcgtcgagggaccaccgaggcaactactgagactgaatttctgctccccaggtatccgaaacttcatcgtccaagccatcgtggatgttgcgtcagacgagacgaggatgaggacggaaaaagcctatgtgaacaagctcaacttggtcttggtacaggtaagtgcagctgccagatgaattccacacacgcttgtattgactcaagaaccgatgtctctatagattctcaaacaagcctggcctcacgactggccatcattcatccccgaaatcgtggcctcgtccaagaccaacctctctctctgcgagaacaacatgatcattctcaaactgctatcggaggagatcttcgactattcggccgaacagatgactcaagccaagactaaaaacttgaagaaccagatgtgcggcgaattttccgagattttccagttgtgcagcgaggtgctcgaaaaggccaacaagacgagcttgatcaaggcgaccttggagaccctcttgcggttcttgaattggatcccccttgggttcatcttcgagactcccttgatcgacatgttggtgaccaagttcctggatcctctcgagtttaggaacacgaccctcaagtgtctgtccgagattggcggactcgacatttcgaacgattacaacaccaagttcatcaacatgtttgctggtgtcatgacttctgtcaaccggatgatccctaccaacactgatatcaaggcagcttacgaaaactcgtctgacgacgaccagcagctcatcaacaacttggctctcttcctcaccaacttcttgggcatccacttgaggcttattgagaccgatgacatgaaggatctgcttctgaatgcccattattacctggtcaagatctcgactgtcgatgatcgagaaatcttcaagatctgtctcgagtactggaccaaggcgagtcgctacctagatgctgctcaacctgactatgtactgaaagcagacgcattcctcagcttgttagcgatctatacgaggagacccagctcgctccgatcatgaccgacatgaaccccttgatggccttgaacctaggaggtgtctcgacgggaatgggtctaggaacatcggcgcagagcaacgcgtcaagcttgcgaaaaggcgtctactcggacatcctttctcagctccgattggtcatgatttcgcgaatggtcaagcctgaggaggtaggccgacaggagcgtaggtcattttcaatactgcttgaagctgatcaacttgtcctcgtgttaggttctcattgtcgaaaacgacgagggagagatcgtgcgggagttcatgaaagagtccgatactatcgttctgtacaagacgatgcgatcgatcctcgtctacttgacgcacttggatgtgcaggacactgaagcaatcatgaccaccaaattgtccaaacaggttagttttcagagcggagagatgtgccactcatatatgtctcgccgctcattccttctgccacaacagatcgatggatctgaatggtcttggaataacttgaacaccttgtgctgggctatcggatccatctcgggtgctatgagtgagccgcctgactttgtcatttcagtcttgaggaattctgatcaacgttttctgtgatccccaggcgaggatgtcgagaagcgattccttgtgacggtcatcaaggatcttctaggattgacggagcaaaagcgaggcaaggacaacaaggcggtctgtgcgtctgacatcatgtacatcgttggccagtaccctcgtttcctcaaagcccactggaaattcctcaagacggtcgtcaacaagctattcgaatttatgcacgagactcacgaaggtaagcgcggctcatataccgtccgtttatgctagaactgacaatcgagcacgcgatccttacaggtgtacaagacatggcatgcgacaccttcatcaaaatttcgcaaaagtgcaagagacacttcgtcatgcaacaagcgggagagtcggagcctttcattgacgagatcctgcgaaacttgcaccgcatcactggtgatctccagcctcaacaggtgaagacctgccagaaagccaaccggcctctcgacacttgcctaatcattgtctgcgttatcacaggtacacaccttctacgaggccgtcggacatatgatctcggctcagcctcacaagtcggtccaagaaaagcttatcgaacgcctgatgagcagcccgaacgatttggcaagtcgttttcagttggctatatgtcgcttaaacaggccgtctcatcatcctttcttctttgcagtggttgaacatgatgatgcgtcagagcaacggcgtagacgtcttgtcggacccagagaacgtcaagcagattggcaacgttttgaagaccaatgtcgccgcttgcgttgccatcggaccatacttcttgccgcagctcggcaagctttgggtggatatgctcggcctttacggggcggccagcaacaacgtcagcgaagccgttgcacaacagggtacgcagactttggtgcctctttcggcatgtcgaccactgacgatactgctgtcctgcaggtctcgttgctacccggacccccaaggtcagagcgctgcgaaccatcaagaaggagatcttgaaactggttgagacctacatcaagcgggcagaggacctggaaggtactaacgccaacctgattcctggacttctggaagctgtcttgggagactatgctcgtaacgtgccgcctgcgcgtgatgccgaggttctcaacttgatggctacgattgtcggcgttctcggagtaagtcgtactgtctcatattcctgcacgactctgctaacgcggacttcctcataccaggcgagtctgaacccccagatcgcaccgattctcaacgccgttttcgaaccgactctggagatgatcaataaagactttgcggagttccctgagcaccgtggaggcttcttccgaatgctacgagctatgaacatttcatgcttccctggtaagctgcatcgaagggagtccactggtaaaacagcgctgaattatcattcataatagcgttgctcgagctccccgcgccccaattcaaactgctcatggactcaatcatctgggctatcaagcataccatgcgagatatcgccgagatcggcctgaaccgtgagcattgatcagataacggagcgtcgtttcttgacctgacagccattctatgcagttgccatcgagctcgtccgcaacttcacgaaagaggatgcagctgttgccaatgctttcttccagcagtacctgttggccatgctcggtgacgttttctacgttctgaccgataccgatcacaagagcggtatgcctgctttacgatatcctgcgtgcaggcatctgtactgacattcgtatgacaggattcaaactgcaagccctgttgctacagaagctcatcaacttggtcgaatcgaatcaagtacaggctccactgtgggatcctgcggtcgtgacgcagcctgacatgaccaacgcggtcttcctgcgggaacacattgccaacctcttgcagaacgccttcactcacgttcaaaggttagaacaggttgttaagttcgacccctgattcgatcaatagcttacgttttcactgcaattctcctgcagcaatcaaatcaagacctttgtcaatctgctcttcgacgcatcgggcgatgtcgaacgcttcaagctcaccttgcgagacttcctcatctcgcttaaagagttttccgctggcgaggacgacaacgccgagctgtacgttgcagacaaggaggccgagctcgagcaaaaagctcaggcagaaaaggaagcggcgatgcgggtacctggtctgctcaagccttctcagatcgacgacgacgcggagctatgatctctcggtgtcgactctttccgagagcaggttcaggtctcgttcgaatcacgcaatccgtttacgcccctctctttttctgccttgctgtatcatttgggaattatgagcttgaacttcacaagccgaatcatgccgtgtgcgatattacatctaatgacattgttaaggggaggacagctttcgtaacgacgtccgctctgtgtcgtgcctctgtctgatatgctagttgagcgcaagtcctatgaacgattctatcctcatgtccacgctgaaggtatcggctcgacatatgaagcccattgcaggagtctaccctgttcggtatcctcgaccactttgattgggatccctcggtccctcttggagcccgtctcggatttaagttcgcggatgcgctgttccgcatcacaccaaaacattttccaattcccgagcgtgacgaacccattgcttcgctcatagtaccatttgttgacagggttatcggcccgcgatcgccatatgaggtctcgaccggacccgactcctgccagagacccaatgttggcgttcgcagcgtccttgagaccgagaccgaacgtctcatcgcgcagagctacccaaaggaaatcgaccgttccgtcaccttgatgcgagggaagaacggcaaacttgtccagatagcagatcggtgtttgtcccggtcccgaaggcccctcgtttgtacacagagccgctgcggcgtaatctccagcgacaatggcaaagtccaacgtgctcgccatcctgctccagaacgcctcttcgttgagcgtccgtccaaaactccgctccagaagcatcttcaacttggacttgtcaatctcgtcgaacgatcggaagattctgattggcatacccttccgaatcaaggttggcgtgtgtggtgtgatcttgccttctccctctgccaacagagcgtgtggcagactggctgaatgtgcgggtttattcgtgatcaagttggcgatcaacgccgcaggtgatttatgcgaggcgatcaacgctgacgcgctggaaggcatgtgcttcaggcagtcccgtgctagcgtgagattggccagggcggacggatgcgacgtttcccattgtccaaggaaagtgtcctggataaagtcgtattcggtttccaaattgatggacaagtgaggcatgcctgatcgagcatacgagggtatcccgccctcccgattgatgatcagaagacgctgtggggtcatatccgacgagggagactcgattggtacctcattcgactggggatcattctccgccaaaagtgctgcggcgaaatcctgtcccgaacgacccatggattcagccaaggcccgaacgacgtcgttgccctcgatcaggttcgtcttgcatccttgatccagagcgacggggatcagcaccgggatctcgccctcttcgaccgctcgtcggacatgtgcgagtccttcctcctcgacatacgtctcccgtcctccctctaccgtctctcttgatctgatgacggtagagatgatcggtcgagccggtgcgcgatgtttggccaagaacgagaccgtgcgctccatctccctgaggaccaacctcctcgcttccgacccacacagaggcttccccgaccggtccagcgcaatatcatctctatccacaacgatgacgctgacgagcccgagtttctgcaagtaggccagacccttggcgacagagtccagttgcgcgtccgtgaacggcccttgaatcttgaccaaggctggccgacgagctcgatggctgaggacgtccgagacgatggagttttccggagatgtcgtcgtcgttgctgatgaggaagcggatgctccgttcttgagacgagatgaggtgagagtgtcctgttgacccccgaacgaggctagaaactttttagaatccctcgctgacggtgccgcttgcaatagtgacaagacgaaatcctggtacgcattgccgagaaaatcatcagcgactttttcttcgtgtccagatcaggatgtgtctcgcaacttgactcacgttgacatcgtggtggccgttttgcaagtcgtcgtgactcgaatgataacgaaacctacgggactgtatgtatacgtgatcagacatccgagcatgagtcttcccgctcgtcttcgagtttgaacggtttccaggcatagacgcacctcgtatgctatccgactgggtatcaagacctccttcgtgactaccgagctgatgacggggtagagtccattccggagacggttcaaccctctcatgatccaagctcgaggtctcgaacccgagagggactggacgttgatgacggcgttcgggtgaaggagaggggcaagccaggcaagctagagacaggtccagaccaaatcctggaaatataccacttgaaatagagggacagtagcgagcggttgtgattgtgtaactcggtgatgacgagattggtcgaagacttgctcgctgaagaatatgatctccctttagcgcgcgacctggtatcccggccaagagcgagtcaggatctgcgacaaagtcttatcacaacgatgatgcctggcctgggatcaggaagttcgatcgtctacttcaaagagcagatggggctgtcattatagacgaggggagaatgttcgggtcttggtcttctgtatgatgtcgttaatcatgtactacccctcgagcttgacgttgtcgacgttgctcggactcgattacgctcgacgagcggggtcgcggttgctcaacatgggtcacccaatgcaaaggaaccacaacagaaagagagagatatttggttaataagtgaaactagcaacaactatacctcactcaataatggtgctagcaacaccatctttgttgagttagagacgaaatcaattgggcttcaattcgactaatacaaacacccaaatcggaccattagtgaagctcgattcgcggtttgtaaacacaaaagtcggtcgagctagcagacacaagagcatatccatagtcgataaatcagtcaaatcgtcataccttgaccctcaacctgtgctattcctactgcgagccttcgcgatcgctctatagaaagtcgccggcagaatgtcttcctccccggacccgcctatccggccgctagctctatgccttcaacccacctgcgtcaagcaccgctggatccgtaccacgaacgcttcacacatctacgaacgacccgagcggatccgagccgtcttgctaggagccgctgcggcagtatctcgactggaagccgcgagtatggtcaaagaaggagggcgggaacagcccgacgagcaggatgtacagctgggagaggaagacaggagaaagagggaagagacgccggacgtttcagacttactgggtagcttgaacatttcggaatcaacgcccaagaaacccatcgggactgcagtcacgtcgacgacctcgccttacctctacattcctgcacctgcactcgtccaggccgctaccgactcttcacagccgcgcctgctacagacgcacacggctcttcaggtggttcattccttcctcgaacacacctctctcctggacctcgcaacccgtccatcaagcagcatcttccccgaatcctcctacctgaaacaactcaccgcttgggcactcgaagctccggagaagatcagaagaggggaatgcgagatcccgagcaggtaccaccccggtcaaggcggaatgattgcggaggagagggacggcttgggcatcgagctgaaccagaatgacctgtatctggcacctgggagcgtcgaagccatcgaaggatgcgtgagtcaccccgtgggaccctttcggccatgcgttagaacgtctactaatgtgtcgaagctcgaaacccgaacgcaggtaaagacggtctgtcaggccatcgacctcgtcagcgttcccagttccgaggaacctatcggcagcccaacaacagccggattgatccctgccacgatcccgccgaacggtgccagagctccgtatgcgggtgctttctgcgtgatcagaccgcctgggcatcattgcgctcaagatgtcccctcagggcaagtctccggtgttgcaaagctcggacttggatgtcttgtcgctgagattgacgggtaatatggaattcttgcaggttttgttacgtcaataacgcggcggtggcggccatgcacggtacgatcgcatgttgaaaatcaagaagaaacgcagaagactgacatgtcttgtcgtgatcagcttatttggcgcatgaccaagaccggaccgtgttcattgacatcgatcttcatcacggtacgtcgatctcgccaagtcgcgagacggcctcgcgatctcgccgctgctggtagtttacccacgagtcccgttacttgtcgataggtaacggaacgcaatcgatcgtgatggggctcaatgaggcgagtcaagccgaggacctcctcgtcgccggtggaaaacctttgaacccgatgaccccgcaagaggaagttatgggacggagaaagaggacttggaaaggattctatggcagcgttcacgacatcgtgagtctgcatcatttcctcgccaacatcaagcgactgatgctctgaagttcgtgctgggacgtatctagtggagctacccgtgcgaggtcagtatggccggctcaacacacagggctgtcgaattccaaggctgaattttgtgcattgtgataggatggcgatctagatctgatcaaggacgcttccgtcaaaatggcagcgcatggccaatacatgtaagccaggatgacaagttgatgggatctctctatgatagctcatgctcccgtacgcttcgagacagtgataacatccaccttgagccgtacgactcggacgacgacttttacgccaggatataccccaaatatatggcgctgctggccagtgccgagcgattcgtaagggagactgagggaacgccggatcgcaccacggtcatcatcaggcaagtagcgtagatccctgtcgttcagatctctaacctcaactcgatcgttcggtcagtgctgggtttgacgcgtgcgaacacgaatatcaagccatgtcgcggcacgaacggagggttcccgtaagtttctgctctcgaagctatttgtcgttgctggactgagtttcggacgcagacttctttctttgcgagaatcacaagagacatccgcgctttcgccgacaagtatgccaatggcaagctggtatcggttttggagggaggctacagcgataaagctttgacgagcggtgcactctcgcatgtcgccggattctttgcggagcagtctggacaagaccgttggtgggacgagcagagcctgacgaacgtatgtttgagtgcttgctgttattctgtgatcttgactgacatggctttccgtatacagctcgagaggtcaaccaaacgcaagaagaacggcacacttctgccgttggacagcgatgctcgcgcggatgctcatctttcgcgcaccagagccttactggaggactttgaaacggcagtcgcagtaggagccatgggaaaagcggacaccgccacatcgacgcctcgtatgacgctacgtgagcggaagaagaccgagccttggacgcccacagccacaccccgtacaaccgcacgggtcaaaagcaaaccggagccctcgacttcgatcgagactttgtcgacaccaggaccatcatccggtatcagtgcaatcgatgcgattgtggatcagctcgatagcattcacctcaaacccgccatggcacccgcagcgtctcagcctcagccgaaattgagaggactagacaaggacagcgaagaggttcgatattccaagacgttggcatatatgcttcgccatggtgccgagaaggaaaggttgccaatgcgtaaagacggctatgtccgagtggtcgatatggtaagcgacagaggggttttgttgccagctagatatgacttgacaactctctccttgcaaaccctagctgagccacccaaagttgaagatcctatcttggccgcttctccatcaccttgtcgtgacgaatgccaagcagcgattcgtcctgttctatggacacgacccatcccccatccgacctacatatcaaaagaaaggcgcaggaggttccgccagaaaaggcgaaccgaaacccgatctcggagcgagtgaaatgtctttggttccactcgaaacaccgaatctaccctcatacaacccggaaaacgacaccgctagctcagtcgagccagcgcccatcgagtcgcgggccttgtcggaaggcggtaatcttgtcgaagccgaatggtttatccgagcagctcaggggcattctttaccgactgtgaccacggagcacttggtccccgttcaagatgacgaggagggaagagctaatgtcggggagatggttcatggaaccaaggaagagctgtgggaggtcattcgtgagtatggcaatattcatagaacctggctgttgctgataccgatacacgatgacgaattcgacaggcgatactgggctgtctaggatgaccaggcagcatgtccatctcactaccgcacgggagggagccaagagtggtgagcgattcgactcggttgaaggggatatgctggactgatcggaatttcatcgacgcacaaggaccgagagccaactcgacattgttcatttacctctccctatctaaactctcgtcgctcgagccggccatccccgtgtacttgtccagcaacggggtagtccttacgcctggggacgagcagggcaagatccctagcgactgcttcgaaaaagtcatccgcgtgcgtaaagagcggatcatgcccgatgcagaagacgccgcgccgagcgagatcgagcgagaatctttggaagcgggtcaaacttccgtgcaagccggagaggaaggggctggggtcaagacgtccgtctcgaaacgagggaaagccaagggtggggtgagattctgggacgaggtaatttgggagcacggacgcccggtcgatccgcctcgtcaacaagcgcgggtgagcatgaagttttaggagaggaagcagtggtatcgcgtgacgggggatgagaaaggaatacatgtgggaaagatgttttcgatcttgagatggatatcttgaggggattttataatgggcacaaaacgagattctaatagaatggtcacgactcgcaaaatagtcgacgatgtgatcacgaccaccttgttctgaaggccaaaagtcacagctgaccaaacatgccaggcttcagcatacccgcctggaccatacacgtccatgtcggatgacgatctgaaactcgttagagtcttttctcacgacctttacgtgccttgccttggcctctggtctgtgacgaatgattcggtgatttgcctcttttggctatttagcgtcattcatttatcaggaacaccccggaagagtttcggaagtaaattcgaattatgacggatgtaaaattacaggatctaacctagactgataaagggtcatcgaggggaaagggtaaatcgtcctagacattgacaaggtccccaagtctagtcttcacgccgtcagctattcagttcgccaggaagaaggataagggtcctgaacgcatcgacaggattcacgactacttggcgatacctgccagtcctcattaccagatccccttcaagtcgcgtcaggccacgagttcctgctgctgtgcctgaggatcgtgatttgggcgaacgacgttgaacgcatccaatcgtcggacaaaccatcatcatctcaaacttcctcagctcgacgcacacatccgtctcatcttatcgcatctgaccttcagatctctgtttccacgagtgagacaggatcacatagaccccacatgcctgtctctggatctctgaaacgggccagacccaggtctctcggggatgacgatcacgctcgatcacggccggcccgtaagagacgtgttgaagaggaccacctaaaggacatccaggcttccgacctcatcaatactactactaccacactccacgcccgggctaccagaggcattcatgtaggctctaccagaaggagcaagagatcccaggcgggaagacgcgtacgggctggacctgtacctcgccccgctgtacctgcggagaaggacgattcttctgatgatggcgaggacgaactcgaactcgccgggctcgagagtgatctcctgacgccttcttcgcctggacgctttgacaagctacctgtccaggcgagtttccctcgaggagactcgttgaaagggttcgccaggaagttggatttgcccccaacggagacgacgagggggaagacttaccctcgactcaacttgccggctatcaacctcggccttggctcgacttccactttgcctcgaaatcatccgcacctcgatagatcgttctcgaccccgaggaagatctcggcttcgcgttcttttgcgggggagacgaccgaggaggaagaagagagcggggacgagaacgggagcgacatcttgagcgagattgaagaggaaaacagggaatattacaaggaattgcaggagcgacgacaggcgaagggaaagggcgtggatcgcgtgagtctgtggaacgagactaggattctcgtcgaacttctgaaaccgaccctgcttcgcctcgaacacagctccttcccgccccagtgcacaatgagaaatgggcaatgcaggaccgcaggctgcaacctaccgtcagcgatgtgacaaccagtctcaagatgctcgtaagcctgatagcgatcgcgcaggaaagaatccgacctaatcatataatgcccccctttacaataccacagggttcgcccatcttgatccgatcgatccctaaaagattcttcccgacgacggcgtcgccttcgagtcctggaccatcatccccgggcagccatggtctggacgaggctgagattgaacgtgaactatctatggacgtcgacaaggcgggttcggaccaagaggaagaagccgaggagatgctgatctcgtccatggtgagcgcacttcgtcgttcaatcgcgatcatcaaacgggattgttcgagctgacagatccatgccttgtggctcagatgcttgccgtagattcggacgcatcggaagacatcgagacgatgcagcttcccctggtcgattcggtccgactagaacatcagtcccgaatcaacgctctgtgtctacctacggccgagtcgttcggtggatctcgagtcaggcagatgattcgcgcgagggagttgcgtctggtcgtcagggacctcgggtcgcccatgtcgatgagtttcgcccggttggtcgctgtcaagaggcgcgggggctggaacgcggccaaggtctttgcaggcaggacgatcaggcagagcctgatcgattcgcgctccagagtagcggggttcaccggttcgggctacgacatctcgatcctcagggatgccgtacggcgagcctcggaacgacggagcttgatggccagtttcaggatcgcggcaactcaagccggtctcgactcgacctgggcgagcggaacgttgacctcgtggtggaccacgcttggaagggtcgagcccttcagaagcttcatgctctacgcacagaccgagccgatggtcagggcgctctggttgctcgagcgggaaatgcaagaggagagggatgtcgacgtgatcatccccatcgattcgactacgaccagcaccggacctgcctcccccactgcgtcagacgaagccgacgaggagggccagataaccatcagcaagagacgcgtctatactgacaatcgacacctggccggacatgaagctctctacccagaattcattgagcgttacgtgtccaggctcggcgagactgagcccaggttccaccagctcagggcctggcaatccatcgatgcgaaatgggaggccagatttgccgcccaagaagagaaggagactcgacgagccgtagagcacaggcgacggaccgctgagcgtacgagacagagggaagaggccgaacgacgggccaggattgcgagggaagccgaggaacaggaggcactcatgcgagcggctcagatcgcgcgatgggaagccgaagccgagcaggtcagactgcgtagaattgaggaggaaaacgcgaggaggcaatccgaggccctcacggcgagcatggttgcgcgagccaatatggagctggaaattgcgatcatccgtaacccgcacccacccacgtaccccgcagtacctattcaaccggttgccacgatcgctgaactcccggtcacgccacctccagctgctcccttggctttaccggattacagtaggatcgagtacggcaaccgatcgccgcccccacctccgccttacaatgcggtcggcggcttcgagttggtagagatcgacgacttgcttttcgacgacgacgaggacgaagaagaagaagacgatattgaaggtgatctcggcgccgtgcgaggcaactgggcagagcccttacccgacgtggcgcctgcacagcaggttgcgcagccaaggattctctcgctggaagaaatgcaggccgagcaggaaatgtacgaagaggctgagcgaggccaagctgttgccaataccaatggacgcggccgatgcgtcatcatgtagtccggtcttgtaccttatccgcctcattgcacgtaaatcgtcgtatcgtgcctatcaacatttcatcaagttctcccagctctcttctttgggataccccgttgccgtgtacaacccagtggaacatcgggaagatggtagacccatctctgctgtagtgacgccaaagtcaaggaaatccaactctgatgggatcctccctgttgccagtcgtttgctctcatgcctgacacattgagcagaggcggctgttttgtaacatctcagggaattttcctggccggataaaaaggtcaaagaaagaatcggcgagaccgaacggttttctcaaatcgcagcgattggtcgcgaccggaaccgagctgcgtttcgtgctttcggtcgtctccgatacgtaacgaaagtcgcatcacctcactagatcactcatcgctcacctcccgatcttgactctgagatcgatgatcatagcatggttctgtaaacaagccactttgtatgtgtgctacccgtagtagtcagcctcgagagtcaagactcaactctgcaatcatgccgtcgctggctgaattggaagccttcgtcctccagaccgatcgcgaacgatatgaccttaccgccatccggctagctaacccagaatcgcggaggaaccagctgagcatggtcactctaaagctcagtcaactaaagatccatagcgagagacaatggacattgttttatctattgcgtctggtaggatcgtctcaggattggatgttctatgaaggcctcctcgtctacctcaacaagggtgattactggatcgacgggctggacattgcggaatatcttcgagaaatcgaccacgacaggttcaatgccgtcgaacctcgctacaaaactctacaacctaattggatttgcctcgctgaggatcgactcgccgctagatgggctgcaaaggctagagagatagcactcgcggacgagctcgttgcacgaagagtagcggccaaaaagcttgtcaagcataaggataccgtaggggcctctgttgaaggtgaatcgataacgcacggagctgaagccgaccaagatgaggtccacattaaaccgaaagtcaagacccagaaacgaaagccacaccctcctgagaccctccgggacatatccaagcgacaatgtacaggaaccagcaagaaagccaagattaagactgagcgtaccgtaccggatactctatggactgctgtggtggacgaacaatattacagaatcattggtgtgtccggctcgattcaagactatctccatcgtcctgatctctctttttgcccagatgccgcaggtacaggtcacgtccttccgccttgtgccgtcaaggacttttctgccgagtacgtatcactagacctataccgtagacttcagccatttccttctcatctcctctcggtcttttctgtagcaccgggccacacgattggcctcaaggcgacaccatgcattggtttggtattttacaagaagcctgtgccaacatcaaggttttgacgctacctcttacctatgcggagcttgtgagtcaagctgtaagacagaaacaaaaggatcagaacaagtatacaccagaagaggtcatgagatgggaagaggtcgtcaaagagtgggatgcagcgactgcaaagcttccgcagatcaagggcaacgctatcatcaagacgatcgacggggaggtggtcctttacaagcttgacgatgcgctcaaggagggatggggggatcccgaactcggcgccaaattcgtcagtcacttgactgatagcttggagactctacggaaagcctggaatgggtcgctaccgctccctggaatttacgacacccggcatcacgcgcttgaagagatgaggtcaaagtacggcagtgatcacgtcggggtttggcatttcgccttctggtgcgctacggggatgcctcatcgaggtccacatgtctcgacacaatgtctcggacataaaaacgtctggcgctttcaacctgcgactcggtttctagaagctatggcgccctggcaacaagcggcggcgatattgttcaggctactcgaaccgacgtcatgcaagcgttacaaggacaacttcgacaatctcgctaggaagtacacctcgatgcatgctatccgcaagaccccacgcatgacctttctaggactcgccatcccgttccaggtgcgcgtcttgccacacaaggacaatgcagacgacaagcaaggctgggtggcgatgaccaatctcggcgatttccaggatggagacctggtcgtaggatcggacgggacggctttcaggttcgagtaccaacctggccaattcgtcctgatgaaatcggcgcttttaagacacggggtcatgcctttcgagggcacgaggcgtgcgctggtcttgttctcccatgagaaagtttttgcgtatggttcgcaagcttgatccttgcaccggaacagcgtattttcaatggattcgacttggaccagtttgatgtatgtacagtgagttgtgatcagctgttgtactactttcgtgactgtcttccaccaactttgcctcgtcgggctgtaagcgatgcgattatccggcgtcatcattatcgccatcttcgttcagcatctgccacgtatgtgtcggtgcttgtggccgtctctcaaatcgtcgatcaagaagacgcagggatgagagattcgacaattgacaacctgcttcgcggggaaatgtcggtcgcccttctcggcacggtcgtggagcacaggaaggacgatgcgcctggtagcgactgcagtcccgaggcgaggtcgacacaggagcgcgtaaccgtatgtctcgcatgtgtccaccgaggtcgtgatgatcggaatcgagttcgaccacacagcgcggagcgtttgggacatagcctcttcgcgacatagcccgtcgcgctaagtagacgatcacatgatcccgtcgatcgactcgacgacggttccgagctcagggacggacggataccatggcatggtaacatgggttttgtacacagcgctcggaagcggtcagactcgatccgggttcgcacaaatgtacagcaatgtcgtgtaggctgtgaagaaggcagccgagaagaggtgacggctgagcgaaaaggtggctgacggggttagtctagcgatcccttggcgcgttcgcaggtgactttacctcggccatcaactctcatgcgcgctgtatgcacaggccaggcaagatcgaagcaatcaatctagtgagctggtgagagcgacacactcgcacactcggttgacttgttacagaccaccgcctagctctgccttgatcatcacaaaccggccgaacacaacgagtattcccggtggcgctgctcttcgaccgttccgtacaatccgcctcggacaggcacagtcaggttgcaggttgatccatcaatcccattcacctggatcaagatagcttccatcccatcgaaactctaaaaaaggcctttgcgatccagactatatcatatacagatcgacagggagaggtccctttggtttcctttccgtcatgtctatatccagacagccacgtccaccgcccatctcgggctatcaatcgtttacgtctggtgggaacgcttccataggtttcgaaaggatgatggctcagaaccaacatcagctggccgtctcgatcaacaataataataacaatgggactcctaccatcagcaataccacttcgagtaacaacagcagtaacgctaacggtggggtatcagcatcgagctcaggtgaaacgatcaaaccatcgaaatcgagcgactttgcgaccaaaggccacgagacgtacggatcaccagcttcccccatctttgatcagccaacatcgtcttcttcattgttacccacgctcaactcgtcgcctttcaacccgagtgcactcgccgggaggatgaacggttcatcggctaatccttcctcgtccctgcttggcggtcgaggtgggtctctcaagctgaaagacagctggaggaggtttggagatggacatgagcacgtcgtcgaagatgatgcggaaggagccgagaacggcgagcagggtgctggaggtctgcacagacatacgagcttgcctgggcgatgtgagtctgggtcgctcgatcgctgccggaacatcagcttatgagagttatgcccttcgttcccccttcgacgtggacagcggcaccatcagcattctccccccgggaacccaagactacttcagtctccaggaccgaatcgatgaggtcttcccgacacccttccatctccgaagaaggccccccaccgaacatcggagggttatccagctacgactcctcgtcgacgaccaataacggactcccactcgggaggagtagcagcctgaagcaggtcatggagaagaaggattggaggactcgagcaggcgtgatgacgagcggggacgatcaggtaagaagtaccgataggctctccggacagactgaggccctatcgactcacgcggctgtgttgcacaggagcagagcatgcctaccggccatcaacggtcctactcacacagctcgacttcgcccagtctcggatcaaaggttcaagacttcgggaacgacatacagaacactcgcatcagcccgtctcaacacctgttcaaatcaaactcgctccgatcgacctattcgggcgcaccggggcaggcgagacgagggcatgcttatacgcaatcgatgtaccacctggactctccgccgggcagtgcgacttcgacatcgacggtccatccgcctgggtgggatgatctttcgcccgtctcgcctaccgaggctgaagcgcactcgcatctcggacatggaccgttccctcaccaacaatatcacggagacgggatcggaagaggcgaagcaggcgatgggtctggaagtgggatgggcgaagaaggtgccgccgctatgctgaggcgacatcagagcttgcagcagggctatgggaagtcccaccgcgtggcagaccggttggctagatcacaggcgattttggctattgagaaccggacgcccctatctcctggctcgggttcgggttcggggactccgatgggtacgcaacagcaggacaggaacaatcaggtccccagcagggatgtgccgccaacaagtcctatcgggcggagtgcttggagtaatgctgccgtgggttacggagggaatgacggatgggatgagttggaccagttgaagcagaggcaggctcaaggtcaatcacccggaggcagtagtctgtcaaatatggcacagcaacaggctcttcggggaactggtcaaccagggtctggattgaatgacatggacccggtccgtcgattgaggttgttacaggctatggaagccatgcagctgggatcggagatgatggcgccgcccggatctacttcaggtctcatggcctccccggcaaatctgactggtctcgcttctacactcgagccccagctggtggatgccaaagactcgtatgaccaacccaggtcttatggaagcgctgcgatcgcccaaggcgcgaacggcgtcgctctcggcccgccagtcagtatggccgatcttgggggatatgaccgtcagccaggtcagatctcgaaggacttctatcagcaccaggattacgcatctatgacgcctcagtcgcaacagggttcgatttccagtcagcctgggtactctcacatggtctacagcaatcagccgggataccaggttctgccgcccactcagggttataacgcctctccgcagtattatggtcagaacggtatgccgatgaccggcatgactcagagctttcaacagaacccaaattattacggtctctcggctcaatccgatccaatgcagctgcaacagatgcaaagacagatgtatggacaacctccccacatgttgtcaccgcaaattacgggacctaccaggccctcaagcggcggtcacgcttatcctaaatcggctccggtcaccggtagccagactgcggctcctccagtcaatatcccgcccgagattgccgaggcggctgcaagagaggtcagggagatggtagagaagcgaggattgaatcctccagcgttcgattccgagatagcggatgcgagttacagcccgcgagatgatcaacgcgattgcagctgacgtttcttttggcgattcacaggcccgttactttgtcatcaaatcgttcaccgaagatgacgtacaaaagtcgctcaagcacgaaatttggagcagtaccaattttgggaatcaaaggttggacaaggcgttcaacgaggctaggggcccggtatacctgttcttttcggtcaacggatcgtgagtgacatccgatgagatagcaatgagaagcagtagctgacgcggacactctgactgcttcagtggtcacttttgcggcatggctcaactactcagcggcgtcaactacaatgaatcgtcgacggtctgggcgcagaacaagtggaagggcatcatgaaattgaaatggatctttgtcaaggacattcccaacgcgtgagcctggaatctatgtagcgagattcttgcagaagtcgagctgacgtcgactttgctgtgcagcgttcttcgacacatccgtctgctcaacatgcccgaacaaaaaccgatcacaaattcgcgcgacacgcaagaattgttgagggatgccggaatcgaagtgatgagaatcatgtcgacgtaccgcgagaagacgagcttgttgcacgattacgggtactacgaggtgattgatgtcgattttcagcctccctgtgtgcctcgctggcgttgctgaccttggctatcttctcgcatcagatgcaagctgccgaacgagccaagcaggccgtatctcagccagactcgcaacccgatcgtaacgaacgaccttctcatcacgctcaatcatcgtcaacctctatgggctctacgggtccacctcctattatcgtgccgaccattcgccctccttctatggccggtttcgtcaagactttcaatccttccggccctccttcagttacgaacaacaaacgattcgctgtgaccagtcgtggggctcctcttgcctacggcatgaacaacgccaacagtaacggccccgggtccttctctgtggttggagggaggacaggatgatgctcgggtcacgaaggtttatttacaactcttcgaaggtctttttcggcctttcatcgctacgactatgacttcaggaaacgacaaactaccgaacggaaaaaaaaccgctcgagcttctgtaaaaccccattgttctgcgactgctgctgctcacctttgagatacaattaggtcatccccgcactcgaagctagtgtgattgcgaccgccagctatcatcagctactagccactagctgtcaggttgatctcaattctatatcttgtactgagaaaaaaagccacgcgctaaattataattatcgactctgaaaaagaagggtgaaggtcggccggcgcctttccagaatccccattgtggcttgacgtgtctaacgcgcatcgcacacgatacgccaatacgcaatgcatacgccggcaagtcaaacgaaagctagttttcccggaacgtttcacgcctcccgctcgaaaaaaagtggtggattcgtcctgatctgggtgggagaggattctggtgacactcgacaatgacacgccacgacacgcgatttcgggttgccgggaattatttcggatcgatccgatcccttcgcatcaacttcatggtcgatttatgcggcttggacaatggaggacatccaggagtgaacaagatcccctctcgtacgtgcctgattcctttagctgtctagccgcctagcgtcccgcagactttgccgtctctcatccagatgcccacgtaaatgccagtcttggctacgacttcgctgatatgactctgacctatccgctgtggtactcacgcgacctccctttgtcgccgcccacagattcattttaaaaaacgttatcgttcaaggtttctcttccatttcacgcgtctcccgtcgacccgcttcgtccagccggcaacccaggcctatgcgcttatatcggcccgaacttcgcgtacccggagatgtcgcgggaacacagatttcgggggttttctcctttgttctcccttctgccgcacttcttcgccgttttctattcacgcgccgcacgatcagatcaccgggagtagaaacgtcccatcatttctggcatcacggcccacctcatttcatccgagaatacgatcgatgtcccgacatcccggttacctcgctcgtaccactcgacgtacaaaagctgtcccatgcgggaagttctgctttagcctcgggctacagcctgctcgctgcttagctgggaatagcagtggcatgtatatggttattacaatatcaggtcttctccgcatcgatctgtgatccgcacgtaaatgattgcatagacatttacctgataaagttcggttggcacgaacaaaagacctgtaccgtcttcaagaacaaagaaggagagcgtaggaatcccggagtcaccggacacctattctgactgcaacggaaggacagcccgtccatatccagtaccgagtctgggaagaacgaagatctcgttgatccaccattgcccgaaagaaggagacaatcgaaatagcccagtcctccccatccactccgctttcaagtctgtctccctcccaccttctgatcccaacgtttcaaccccgttcgttttgatcttgcgatctacggaacgctccgatccaaggacgattttcaggccagccctcgagacagccctacaaccagctctttcggttatcatgccctcgtcccaccccatgctcggcaaacgagccccattcatcgctcttcctgatgcgaatggcaatctgtacgaactcccactcggccaaaaggtgagtccccggcatgatcgaaacgtcaggctcgcgctcagctgattgatccggttgcgcgatctctcggtctaggccatcgcactatatgtctttccccgagcaggaagtcccgtgtgcacgaaagaggtgagctactcatcatggaatctcagttcccctgtcggtacgacctgacagtcatccggtctattctcgtaggcatgcgcattcaatgaagccagggatttgaacccggtgttttcgtacttgaacaagtacgactttgaaattatcgggatctcgggaggcaagtcccgccatgatttctttcgctgacatgatcctgatcgtaagctgacgaacgagcgcgtgtatagacccgatctcgcggcaacacaaatttgtgcagaatcataacctaaaccatgtggtcttgagcgatacgtcgggggaagcgcgacgagcgtttggagtgagcaaagtgctcggattcatcccaggtgagtttgtctcgcttagggagaggggctctggtcagacatgtaactgatcgctcttccgctgtatctcccatctttcgcctattttcaggtcgcgaaacgttctttatcggtcgggatgggatcatcaagggggtctgcacgaaacaactgaatcacaaggcgcatctggcattgatcgaagcatgcttgaaggtcgagaccgaggtgttggagaacatgtgaagaacaagcagacgatgggttggattcgctcgggagtcgccgtctttgggttttataggcttcgtgggtttgccgccattagcatgatttcgagaacgttgtataaagttttgtgaagacttgtcggtcgtataccatcataaataatcgagccagtactaaataacctgcgtttcatggcaacggaatcttccttccgagtcgttgagaacatcattatgaatcgttactgttgcagtcgactaaatcgcaagccaccgacgtcgccgtttcggtcactactgcagaatagatttacgcccgaataggtcctggtctgtacgtctatatccttggatcatcgacgtaaatcattgccttgatctcgaaagccgccgatacttgcgccagctctcgataatcagagtagacgccaacgagatctcgattgagggcgacaccgtgcgagttcccgcttcttcgaatagcttatcaggccgcccaagccaatcacgctggatatggatgtgatcggaaagggagcgatcaatctacaatactgagacgttagtgtcaccttcctgtgcatttgtaagctggacccaattcgtctgtgctgatcatccggctcaaacgctggcttgtttcaatatggccaagacggtctcacacccatcgcgccgcgccagattctcctagtcaagatgccaaattgcacttactccattgcaggatctacaggagcacggggtctttcctccaatatagagtccagacgggaggagatttctgtccattattcgaagtattcgggaagtttccagggtaagatcgacgagctcctggttgatcggccatgtccgcgcgttttcgggttgttgaaagggaaattcgtcaccggtgtcggtctctgtctcgctcgagcgtgacccttatcttaatcaacctcgacctgtacgactcgacaaaggggtatttcagtcaacctctcgaggagtattcccggtgctcagtaacatctctgagttaaatatccggagagaaaatacggtccggttcttgcccaagatgcccaccaaccagtcggaagactcaggctttgcggtcgaacggactaggcctctctctcgaccactttccacttgcattgatcacggacggcatctcgacgttcactatctctcgatgtcctcttctgccgacatcttgttctacgaccccgattcgtcgcattctccggctgtcagcactgctacagccgagcggtacagaacgcacaaacggagggtcagcagcagcgcccgttccgccgcgtctctaagtcgctcaggatgggatgaggacacggccagagcgtcggtcaggaacatacacacaccgagcatgcttattcaggcgcccaaattctgtgcacctatcactatccctcaaggccgagttgtaggaggatctaacgagaagatgaatccaccggactcggtgggtcaaacactgcatacgatcaactcgctatgacaagctgatagtatctgccttgacacaagcagattacacctgcactcaattcctgcgcttccacggacaaggagttcgtcctgcctctctacgagaatggcgcgaactctcgcccgaaatcgcctttcccattctcgttctcctcatggcaaacgactttgaagacggtcctcctcggtctggtcctcctgcttggcatccttcaatacatgctcaaaaatcctcttaatacaacacgatcacttcagcaacaatcactggtgttccagcagcaggaacgtgagtttgccaagatcgcacagaggtgcaacagtctttccgggatcaccgctccaacctacctcgaccggctccatacgcttgaaaagactctgaacaagttgaaagaaaaggatgagggtcgacatcagatctggatgtcggaaccttctgctacttcggcctattttacctcgatttcgagatcagaatggagcttgtccgagcgcccttttcttttcatcgtcgagtctacacacgaaggcgggtcgggtgccaatctcaagatctttacacccaaattcgaggaagaccgagcgaggatattgcccctcttcggtttgcccgctaaggatcacccgccagaatgggcgatcgagaggaaacaaagctcgattgagacgatcgtcaggggggactcggtgtacacggtcgaatttatcgcctggcaggaagaccagtcgccgtatgccgtcctcgcagaattccttgagaccacgtccactttcgtacacgacgataccgttcagatacaccttgatcccggagtcagggcgttcatctcgtcggggctggcacacgaatttgattccagaaaacaccatggcatctacatcgacgtggccgatcaggatattctcggaattcgggaaaagaagagtcctcaggagatcgaactcttagaatgtgctaatcatgtgagtttgaagtagaagatgatcatgctcgctcggtccctaatcggtagcggagtcttccagttcactctacaagccatccggaggactcgggagacgatcgaaattggcatgaccgagagcacagttggcgatattttacgagaagaattcgcagcaatcggtatgccggatggtgaaggcttggtgttattcggaggtatgtttgctgcgtctttcccaagccttcgaacggaaactcaagagcctattcaactttgcagaaaatgcggctctgccccacggcagcggaacggatcgtgtcttgaccgataaagacttcatcctaatcgatgccggaggtactttcaggggctatgttgccgacgtgacaagggtgagtgcctgtaagaatagggcgttctgccccacctttgcaccttttcacgcctttctccgcaaacaagacattcgccttgaaagacactcgcctcagtcgcgatcagatgcgactctggcataacgttcaagcggctcagatggcggctctgaaagctgccgtggaacacaacgcgacgggacacagtatcgacgaagccgctcgaaagcttatccatgaccgaggtttcacgccggaggaaaagcaagggctaacacaccgtctcggttagtgataccctacgatagccttactattttgactctcattttcgccgaactattgcttctaggccacggtataggcctagagggacacgagtcaccttacctggtcggctcgaatcatgaccagatcgaaccgggcaacacgttttccaacgagccaggtatctatatcgtcgggcaagtgggtgtcaggttggaagattgctggtaccttcacgagactatggaagggaagcgcaccgctcgtatgatgacaggaccggctgcgagcccggtgctgatctagatggtagcttgtatgagctggatgatcttgacgtagactatgacgtatatccgcttgcgaactttgtcacgtgaccatcactgggattcccgatcgccgatccagctgccatctcaccggttctgaatgactgaaagtcggttcagtcctggtccacctttataaactgaaattcacaagcgtaggttttggacttgcagacgacgaataatacaaccataatacaatgcccggagcaccaattcctaaaaaccctctgatcttgacgctcacgctcgacaaggccagccacgcctttttgacaaatcttcgatcgaaatactttccaccttcgagaaactttctctcggcccatgtcaccttgttccacgctataccgccgcatcgagtgatcgacctcaacagacacttgaatcagatctgtgcgtcgacagctggctgggatgtctttatcggcgaaccaaaggccatgggcaaacgcggggtcatggtcaacgtcagagagcgaccgtccggcacagtcgaggggattcaccacgagctcctgacttcgctcaagcggggtgtcaaggaagagaaagatcggctcacggaccaggatgcccgagcgcttggaaagccgcacgtcaccatcttgaataaggccaccgatgaagagcaggtgaacaagtgcctggaggaggtgctgaaggtattcgaagacatgaaacaaccaggacaaaaggctggacaacaggtcggacgtgcgataggtttcgaattgtgagccctggattggttgcatgattgtgcgctcgaccaaatcgctcaatcatttggacaactttcggatttgcaggtgggagtatatgggtggcccttggaagccactcagagcttattggctgaaaggcgaggaacaacaccccgagaacgatgcagccaaaccgccaaattaggtgtcctgccaaatgcacatgctataaatgggagtctactgtatctatagattcaaaatgctgtccctgcgcgtacactacttgctacgagacgtccaacccgttgctggctctcccataggcgctccaccgcatctagcccttcattcgagccttccgtactttctcttagacgggatcttttagtcctgaggcttagaagaccctcttcagcatctcgctctaccatttcgcacaagtcgagcagactctgtttcacattcctctcgacctcttccgacatggtctccttcatgccggtgagggtttccaaccagtccgccaaaaccaacgaataagactgggccgggaagtaaggctgttcgacgtacgcgtccacggtcttggcgggtatgggcgtgtggagtagtctcaatgtcggcaaaagtcggtgcgatggttgagccggcgcaggatgggtatggagggtgtagtcactgaaggaataggtcgtcaacagctgatgatatatccatgcgtgcgagaacacaacttgcccaaggtatccttgcatatcgagcagttcgtgtttcgctcgacgagcctctctctcaaccttgatccagagccggtcgaccaactcgtctactactactgaggcgtgtggattgccacccagctcgacccccttgctcattttggaatcggcacctatgtcaccaacttcgccgggataaacgggcacgaacccgtattccgtgaaaagagtctcatcgtcatgccctccataagggaagaatacttcttcattcttcctgacccaccgatctccgctgtctagtttggcaacctgagtgtcgtcctctccagccgatttgggcgagacaagatgcaatgaccgagccgaccacgatgcgtctgccaccgagatcgcatccgctttgatcacgattgacgggtctgacaagaaagcggtggaaagcgtctccgtatccgtcacgtcgtgtttggaagacgagtcggacatgttggcgtctgccttggagcgtttcttttcgggcttgtcctttgcctttttctgctccaatttggcggcaggtgctattgaacgaacgagcgcgatattggtggcgagaccagctttccggtagttagtatggcaatggttcgcgaaatccagtacgggcgccattgtatgattctgttgctcagcgtccagatcttccttcttggttcgataattcgcgtgcggttgtgctttatgcgacggaatgttcaagggcaaatagaacgttcgggtgtttacttgtaaaacgtgaacaagtcaatggcttggacaccaccaatgtatcatcgcagtgaaacgtaccgtttaaccaaccccacagaaaatcctcttcgaccacttgttcccatgcctcgacccaatcgagcgttggatctgaaccggcgccacgcgcgagatcttgcatggcctgaaccacacgctctttatccctcgcatatcgtctggacacgtcttccagcttgctcttgacggacgacggaagatgatccctggcaagttcatgaaggagggtccaggtcgcgtcctcttcgtcaccatcttcagaatatatccctgagccttcagagctggataagggtctccggccagcactaggagagatggtccacgtcaggggatgccaatccctgaaactgtccggcagggtgcgcagatacggtagccagggagaagtcgatggggttcgtctcgtctggagcggccgatatagtgacaggtagagagtcaagacctgggtggtcgtcaaggccgagatcgcaagccgaggagagaccgaaccgttggcgggagggctgggcgaatgagcgctagatcctcgtgaacgatcagacagactgttcgaagccgccttttgtcgcttggctccttctcgctggacggtatggatgagccttcctgacgacgtgcgactaccgccaggacgaacaggtcgtgctacggggaccacgtcacgagggtacacctcctgtggcaggccgttaggatgttgaacatggatgttgcgagggtgcaacaatgcagacggcggtaaccttagaagcgttgtctctggctgcgtagatcaggcgaagtctgggtcagatggttcagcgacagattgcagagccgtcagactggagtgcgactgaccggaatgtcctcgctcgcaaatagccctcttcccgcacctttatagagattcgccgttcggttagatggcgcttcatcgtctcgtcggacaaagtctggctaagcttcgccagactcacctggtacatctttccattccaccttcaggtccgaactattccagccgtgcttctggtccatccatgtgagcagggctcgccagctttcttccaagtcggccataacaaacgggccgtttactatactcgtaccagactagtatgtgatagagtcaacgacgacagttctactatggagtcattcattatttccgagggggatggtctggatgtttggttgttcgactttctcgcggtcgctgcatgtcccgccgcgtagagccggtcccgagaagtggtatggttatcggggtgatgatgctacaactaacttgtacctatacaccggcatagcatactgctcagggaccctgcatcttcaccaggagatagctcgtcgagctcaagcatcgtctcatttcagcaggtccagtgcatcgagccgaaaagcggacgaacggctgccccaaaatggcgttcgctccctctccacgacatactctcgcgaacccgtcccagaacccttcaccgttatcgcctctctctccggcccatagcatcagtccgttacctctttcagacagtcaaaagttgactcgtcccggaggtccatcccgacgcaaatcgtccgggcaaaccatccaaaccatcgggaacaagaggaacaagagctattcgtcacaacatcaacatgctgccagcacgatgtccggacctgcgggaaggaggagcaacccgcaatcctccttcgggcctccaacgggtgtcacagggaaagatggccagtgggctactatggatccggacgaggtattccgaaggctgaacgtcaaggaagtccgaaaggtcgaaagcttgctgagggccagcgctgctgggaaacagggggaattgcggaacatggtcaggtcagtccttgtcctgccatcttgtcggcctgatggtccggtctgaccttgatctgtacttcttctttggattggacagcgagagatatcgggatcttttgctctcgacttctcaaatctcgcaacttcgggactcttctcttcgcctatccaccaccctcaaacatatcgaaggcttgtgttccagcccgagggtcgttggtccgcagaagtacggcgacaaccagaaggcatccgcggagatcaagaaaagagacaccgatacctcggccaaactcaagctggcaatcaatggagacaaagaaacaggtacgtccacccggcgggaactcgagacgatccactcagctgctttttcttcgaatacagatatcaagaatcagctcccagtcgcggcatctgtcaaacttcttctcgatgtacctgaaggtcagcagcctgtgtacagttgcgcagctctacggagagctgactcgttacggtgtcatactgcaaagctctgtactcgtatctcgccggcaaacaattcttggaagctgcctacttatggctcctaacgagagtcgtcaaggaagggctcgtcaatccttctgacaacagcatgggagacaaagattcgggtcatcaggtgagtactacacttcacgtaggaatgacatggagtgacgctaagactctcgcgaggccagactttcttgccactagtacagaaacaatgggagattctagtacccctacgtgggcagatcgtcgagcgggctaccatctccctacgggaccttgctgacggaacttccgcgcctaaggaggtacaaactgtgagctcaaattaccacccagcgaaccttcgggtccatatcctaaccattccttgcgatttcatcaggcattggcccatgtactcctggctatccttttgctcgaagctcataataacccactacaagatatcctggacttatttttggctcagcgtaccaaggccctacatgatatcaacgccgaagctgtgcaggcgggcactcgaatggcggctgtcgggttcacgttcgggcgttcgaccgaaaggactgtgcgctcgcccatcacgcctcgatcgagcctgccggaacagtctgggcgaaagaataggcactcaaggaaggattctcgtctgaacgctgcggaagtgttgagatcgctgtcccctgcgcctcggagaatggaacgatcaagcagtgcctcttctgcgcaaaacgatgatagtgcgatccgcaaggccaaagccaaagaacgtagacggctgtcagagcaggctcgagccggcaagaccttcgaggacagcttgaaactgctgtgggaaaccgtcgtcactgcacgagccgtgatcatctcggcggatggcgagtcactcctggagactatgatgcgacgggtacagacctccaccaccagtacgaacggcgaggggagccaagaggagagcgttaccactgctagcttgctgcgcgcaatgccttcctcccagattcttcaagcttatttacccaattctatcaagaacttttcgccttttatcggaagtgtcggacaaggcgtggacaaatctgcactaggcggattgctagatacatggttcaagaccagcttggagcgccttgaagcacaagctaaaggctggctcggagggctcgactccatcactgaagtttggcaggtcaaacggcaagcttcgacggcactcgagacccttcagagtatgcaaggggcttcgctcagccctacagaggcgaaaagtctcgttgatgctatgacgagcgcatttatcgatcgcgctcaaacgatctggcagggtcgactagaagctacggctggggcgctggaggaaggtctccaggacgatatcgaagcactcatgcaaggcaacaatgatgtggctcagggtcagtccgcggttctgagaacgcacttccagcgtgggcactaagcgtaacttgctgtacccagatttgcacccttctttgtccttcttcgcaccgattgcattccctgatcacagatcagtcagctcgtctttcgcttccacggaattaccggctttcacggcgaccttgaagaagcgattgcagagcagaacgcctatcttggacaaacgactcgcggaactagaacgcatggccgctgacatcaggagtgatctgcgctcgttgaaagaaaacgagaaagatgccgctttgattgagcagtaccggcaggcagcgaccaagaccgcaaaggacatggtcggaatgctttccggggctctcgagacggcgcggacgcgaagtccaaataaaaccgaacgcgcgtctacttgcttgttcatcggtcggctggctcttgccctgatgacccaatcaagagccctaccaatcttattgctgggcaagaaggcaatacaaggtaagcaggaaaaatagcctccctgaatgctgaagcctcctgatgtattagtccatctgatgatccaggcgtagtggcttcagccctcgatgcagtgtacatcgcatcgctagtagagtggaaggagaggaccgtacaggacggactcgaagtattcgctgaagcaatgtcgagttctgtgccggagactcgagcaaccggtaggttgaagaacgctggaaccgacatactggagctgacttcggcgtgtttaccctatcagattttggcaatggcttgatatttgctctacaggatatggcaacagcgctcttcgacagtggtctgcctatcgagtatcgctcagccgcaacggaagacctttgcaaagggttcggtacgaaagccatacagttagtgaaagagaagcaaatgccttgcccggaagaccagcgcctacttttggaagcgattgcaagtggcacacaggaaggattacctgtatgtcctcacggcgaacggtcgtttttcgggaaagagtcagcttacaggcaattcatttggttaacccttctagaaacacgttcgcaatgacctacgcaagacacaactcttgctgtatccagccacaagctacatcagggtggacacggaaaaacctagcgacactcgattcgctgacttgcttcccctcggcattccaaatgctaatcacgaatacatttcgcccgtgccaattgtgaaaccttcggctcgattcagcatgttgtcaatcgtgtagtaatctagtcgtgaaaagttcgtcaatgcttcgtggatataagatccgtaggcatacaaggtgtctggtttcgaatttttggcttcgctagggatgatcacggctatgtctgagctcggtcggaatggcctagcgtagagttgggtctatgttcgattgcgtcatctgggtggcaaagccctcgtccctggtcgccccatcagcatggacagaagccatcctggccgacaattgattctgtcctggaagcttcagggtgatcttcgaggatgttgttgaccctgtctttacggacgatgcagagttggcaggatcggggttcgagtaagcctgcaaaggcccgattggcatagcctagacaatcccgaattgagctctaatcacaccctaggctatatgaagctcgactcacctgcggcacctgcttcgtagtggccgatatgatacggtgtttgaaggacccccccatgcttgggctaggggtcaacgcggcttgcgtcaaggtgcgtttgactggggtgacaaaactcgtgggtgtgacatgctacagtcgacgggtcggacgtcagtggcgggtcgaatcaatctcctttgtttcacttaccggggaggacgaagcgggtgtgtctctgaccctaactgcgttctcagaaggttgtagtatgagctcgggcaatttttctggctgcgcaggggcgatcctgcgaagtctactagagatgcgaccactagccttctgagggatttgaataggtgtagtgtttgaggtcgaggtcagcgaggaaggtgttttgctctcgactcgacttggttggacaggatctggtatatcaactggagcgggagattctgacggagattctcccgcagcaaggatgtcttgcagggacatgtcgatatctagccaaggaaggtccgactgccctagaccacttgggaaaccaaaggagagatcgtcgtcgatgggcgacagaacgaccggctgggcttggatgggcaagtcgatttgcgcttctaccggtgcaggcgggtcagtgagatcgatgacctctgccgcggtatcgtttcccgctagaagcgtcaggttcgagtctggcacgatgtcaccgtcttcgacggacatcaggtcgtctgccatattcgtttcccctaggattggtgaagaggtcactggcctcgaagactgggcgaaacgcggaaccgattgagcgtcgtccacttcgacatgctcatcgagcgagtggttcgaattcgatgttgagtcgcccgacctcactgcatcgacattcttgatccgctgccgggcacgggtcaactcgaggaggcctcgtattacgggagccagctcgctatccgtcatctcgtcaagattctccttctgaagttccttgtgatcgcttgctgggctcgatggggccgacgataagggtgactgccctccgaaaatcgattcggctgaatgtttcaactctgcggaagtggactcggtagacctgcagcaagaataagagatggttacgcctccgaggatgtgagcctgaatgaccaaagacgacccacctgcctatcttgctccaaaaatcaagatgaattatccgctcgggtattttgtagcgttttccgttgatatacgcgttttcgtattcaatacgcttgcgttcgccttccggatcgagaatctcgataatgccattatttttcacgcctggacgagtcacgagctcctctttcattcccgccttcaaagttcgtttcttgggcttaactcatcgagaaggttgtgctatatcagcacggagtcagcttaatagctaacgaagaatgcttacaaggagagactgggcatggttaggacacatccactttcgcatgggatgcggcatggttggagggggtggatccaagcagtctagatgccaatgcaacgagcagtaatcgcacgaaagcattcgtctccccagggccacaccagcggcgacaccgggaccgattggtgccgcggaacccttgcaccggaaacatgtaactgctttgcccttatttttgagtttgtaaagatccttctcttcggggaaaccggagcggctataattaggaagttcagctagatatctggaggagagaagcaggcatttgtgacttgctcgaatttgacgggcttctgctcgtgattctctaaataacccccatcatacccggtttgaactacaatgaattggaggtcagcttgctacggtcgcataccattttatttctttctcactattggcgaaggtattccgaatatcatcagtaagcttaaactcttgagggttcgtgttgtcgatatatttcatcagagggccaaagataccacgactcggtatccgcatattttttggctgtgacaaagaattcctgtgagagggtgccaccgcttggtcgaccttgcgcatacactcactatccgcttggcctcgcactgcttgcagaaccattcgtcctcttcgggtaattgatttacatcgagtggcggctccagacacatgaagtgaaacgaacgaggacagccatcacaacaaaggaatcgtccgatcccgccacaagaagaacagaaatcgttgtttggctgagaaaaacggcatgtccaggacgggaggcatcgaaccgttattttacttgtcctgtgtagcctgagatttacgagcagaccaactcaccaccgcctcttgactcgaatcaacaaccccctgctttgctttccccttgcggacagcggtcttaatgatcgtctttttgatcgcataaggcgaagtgtcgccgctgacaagactacctcgtgtggcccgcatgactgagcccatcatttgcggcgtagtggctcgaaaagtgttgcggctggttgcttccgcttgctcgtaatcggccgttgaagggtgtaaagacgaagacaccgccgtcagcggtgtttccgccgttaaatagtcggatcctgccgaagctaccactgctgcagttgccgttgaactacttgagccacctgcaggtatctctgccagcttttgacctcgaaaagcgaggcgaaagctaggagaaggcggtttgttgaatatctgcagcgctgcagacggagggggtcggaatatcgacctcggagatgcgtcgtatggttgcaacggggcgagactggggtcactagcggcaccttgaggaggtggtgatgatggtggtagcatgttgaactctggtattgggtcttcgaatattgatggatcgtccggtttacgtatcgacgcgttcacagagctaaacgaacgcatcacattagctaacggttctactaaagtgcgcccggctggaatggtaacatacagtctcggggcattgcgcctcggtttgaagcttccgtccagagatgaggctggcgatccagctcgcgaagggccatatgcttcgctgtccttctgcaaaggagctaaaaccttgaggttcttctttggtcgtccgcgactacgctgtgacgcattccctgacgcaggcacggaaccactggggggtagaatggccttggcagagattgtagttgcttgatcagaaacgttggcaggtgtcgttgtcgatagccttgcgttgctgtcgatgtccttctctaagccctgttccgcggccttcgactgctcctccagatacgaggatttgctgatgtccggtccaactcgttcgccaacaaacggcgatgtctcatcatgaatcacggtcctctggctcccattcgcagctcgagaagaagccggctgatcggcaagtgccatctcaaggtggtctgtcttgattccccgcctcaggtcgttctcctggattgagggaccgggcagtctcgaagcaataacgcctgttccgtgggtctcgctttgaagcgattcgaaacaagaaactcgatggaagctagcgaactgtagctctcgaaaatgttggtcaaaagtctgaggcttggaaatgcgacggctattaacaagatcaccaagatcgctttgaagcttgaacaagcgattcacagcggcacggacaattggtagcttcgcggggatatataattaagtcgcgagctcacgcgttcacggccgaggattgacctacccagctggctgcaccccggtcggcatggtcatggatcgcttagcagcagagatctggtgatccgaaactggatctggacgagcttgttcatgtaaacagtgcgtatatatacttgacagcctgttaccaatcgagcggaccgatagatggctgcaggtcatggcatcccgtgatgatcattatcgcgaggcgtgcgacggtataggacataaggggcataggataggtaatccgccatcaaggcgtcgttaggtcatgtctcaacatcgacgtcgttcatacgaaaagcgtctcaaactcctctcggacagtttgactgatgacgccgaaagcatcctgcaaggtcctgccgataaattgaagttcctgtatcagtccctgtatgacgagttgtcatacgaaacgtccgatatcgagcgaaggagcagagttagctaccgacaacttggggcggtcaggcctgcctgtcacgaattgtcgatccacctacctgcatcgccaggatataagcgaatatcaatagatggcgaatatcgccctcgctgatcttgcgcttgacggtgtccagctttctcacgacctcgaccaggcgtcgacgcgacaattcagcctgcggtaagacgggcggcatcggtagcctcagccggaaagaggcggataaaagatagaactaacgaacagcgagtattagaaaccctcctgtctgccattaatattgaacagcctctgctcacgtataagatagtatcggcgacctgtgacacgaagcgagggggtttgatgagctaaagcttgaagaatgtgtccaagagcgctcatgtccgactgaccatttcccgtctttgctcattaactggcgctagtatttctttgtgaaccgctgtgtccctgaatgacgattcaatgcgttgagtatgcgttgcgaacagtgtctttcacctagaaacctgtgctacacctaccattcctgccgagtgatcacacatcgcatcgaatgcagcttgtcaagcagggtttggcatgaaccgaggatttcgccgtacatcgcctgaggaaaaggccctttcaaccgaggctcgtttttcgtttgagcaagcaagttcctcaagtctatgagctggatctgtaaatgcagctccctgcgagacggatttggtaagtgtcagagtccttacgagagaggcgtacctggcttacatgctcataaactgtctcgccgcttgctgagacttgaattcggcagaggtagcgccgttggcatgatcgagcaaactcgcagtctcatcgggctccatagcctcgttccattcgcgtaatacaggcgggtctggataggcactgaccgtctggccactgtattcgcggactagccgagagtacaggtaggcgagatcaagggagaagctggtgaatcgcgattggtgagtgacaatcctgagacacgtgacagtacacttactcgctgagacccatgcgtagttcggtacgtgcggcgaaaggccaccaatagttggacacgatcgtcgcccagactaccccgagtaccacacttgaagatcgacgccaaccgatctccaatgccgatagatccctttccctctgattgtatctgaacggaggcagcatcgtgttgaatctagaccgtagcttgcctagcaggtgagggtaactcacgcatatagacatgtcaggttctgcgatacggcatgcttagtctcgctatatctcgagagctcaatgtggagatggcttacgtatgtcaacaggatgaatcgtccggcctgttgatatgctggcttctgtgtgatcacccagaagcaaggcatcgcaaagaagaatccgatgatcgggagaagaatcggattttctggaaagctatcctagacttcaggttctagattccggcgagtgcatgtcgatacctcccactcacagtgtgtaaacggcgacagctacagctgcgcccagactaggaggagccgagcgtgtcagcaccggtccctgaatccatggtaagacataaaaacctacaatgtcccggcaactcgataaaaagacaagagatttgtgcccccgattgaagggttcatcgtagcccaaaaagctatcaaggcccactctccgcggaatgcgagaaacgtgtctcgccagcggtccgtaaaggctggcacggccagtatgactaggatttgcgactcgtaagtccaggttctcgggtggctatcgaaaagagattccctaccggtacccaatcccactttggttgcatatttaatgtctggctccttgagacgagtttgaaatcgccacagcgcctgtttccacctcaagatcgttggcagcgattctcttgcgggaattgtaagggtattggatttgctgcgccttttttcgggaaacacaggaggcggctgcagatcgctgggatctataggaatgagtttggctggaggagaagacggttttagtcggtgtgcgtcagacatagtcgcgctgcgtcttaccgactcggtttcggatggtttgcttgcgtcgagcatgactttcggccgttgttcgatgtcctctcctgaaccagcgtaacatggagggtaacctactagggctagtaccatccagaagctagttcgtccagtgtcagtattgtggtcaatgtgcgtgtcagggagaacgcgatgaactcacgtcaaccatggctcgtatcaatatgacgagttcacgatcaaactcttccagcgtaaagacaaagctgtgatgcgtcgaagttgaggacagttgaaaagtcaaccggccattgtgaggactcacaagtagatcgagtagatagcgtcgattggtccgctcttgtcgctttcctcctctcgttccaaaggggaatgttcattgaacaattcctcaagacggcgatccgagtgtccgctaaacagctttttgactgattcgagtgacaacgtgcgaaattgctcgagcgttcgctctaggtctgtgtgagtgtttatcaaatcttggagatgcttgtcaggcgatttgaagtcggtcatagcaagtttgaccagtccaagtccgagattgctcagatcctatagcacaacgaatctaaatcacatttgcccacagcgaaatattggaacatgacttacgatgaggcgtcttgtcgtcatagcaacagcttctctatattcgaaaaagaggttcccggcttgagctaggggctcatcttccggatcctgagccttcacgtgttgtgcctgatgcttatagttttgctcgttcaaggtggcaaacgaggaacgaagggattccccgttatccaacgtgatcttcccttcttggctagcttgcaacaattcgacctgcaaatccgtccccgccctcattcccgtcaggtgttgggcgagcttctgcaagctatcgatcacagcagagtatcggttcctctgctcagtactcatgcggccgtcgatgatcctctcgtgctgagcttcggccaggtcagccttgagtttagtgaatgattcgttgtgcgatttgacagcttgacccaaggaagcgtaggtggcgtcgccgggcggatagtccagaaggaaagtagcccccaacaggctcagtagcgtaccaaatgagtcgagtgtcttagtgatggagccttgaagccgattggtagcggacgtgggccagagggcgaaacagattacattgctgattgtcgccccaatcaccacgatgagtaatacctccgccaacttgctcatgccgccctccttgacgacaacagtgaagagcgtgaccgcagccattgaacagcctttaccaggccaaatttagctaccatctgtagatcgcttccagtcgtctcttcagctcacccgtgttaaaacttgggttgttgacccattgtttcagccaagctaaaccgcccatcgcgatgaggacccaggtacacagtactaccatatcgcccagttcaaagacccagacatcggcagctggggtccatttgtcgaacccgtactgagtcaatatcgaaaggctgcagaacaccgcagctagagatgcgaggatgatacagtatttcgaagccaggatcatgcctcccgccgaacgtgccgggtgaaactgaatcctcccgtcaagatgagcttgatgctggacgtaaatcggcatgcgaagacttacatagcatacgatcgtggcaaccatgtgagcgctataggccggctttctgatcactcgtccatgtacgtcgtgttgtacgcttgtggagagcaagtttgcaaagaccgggacgaaggtgaagagggatgcgatgaggtaggcgatcgagcatttgagaacctgtcgttgaggaaccgtcaaggtaaagaattctatggcacgactatataagtgagcgcttcttattatcgcttggtaccgagtcggactccccatgcacttactgtttgcccgctcacgccaagatgcatgccccctttgaccggcactcacgtcgactgccgcatcgggcgtcgcagtcgcttctatgagattcggtcgtacagttccaacactgatcccgtcatcttgcacaacatgattacctctatctggctgactctccgcatcttcgatagtttccaatatgttcgtcgaccatgaccctgatgcagcattgatatccggcggcgagctcgacaaggtctctggctcaagcgactcggacggtatacgctttgcagagtttgcttgcgatactatccgcattggtttgaaagtagcctccgaaggctgtcgagatggagttccatacgacgcagccctctcggttggccgatcttgagccggagacgtgaggatactggtccgacgaagctgtttttggccaggcgtaatctcattgtcgacgacagaaggccgattgggataggattgtctgagcggtgtagtgggcgcagctatcgtagaagctcttgatcccttctttggagaacgatacgaagttagggaccccacgtcaaacagggcagaaagaggggagctccttgaactcgacgaagttgacgaagcgcccaagtgtgatggattcaatggaggtatagtcaacccccgtctcgtgtttccagacgatggcgggctattagaaccaccgaacgagtcttccgcctgttccgccaaatgtcgctcttccaggagcccggtgacgcctctccagctctgtagttggacccggtcttcttcggattgcacatcggccccaagccgccaagttgtctttataggccgattcatggcctcttgtggcttgtagagcacacaagctagcgagcttggactctagatatctatgtcgtcgggttaatgcttgaacgcaaattcatggtgtctgagcgctttgaaagggatgaacatcgagtctcaattgtgctcgatgatgatgatgtcctgatcgaattcccatcaatccatcatcgaccggaagcattcacctcgaatcggaagtaaatttagctgagaaatgattccgaaattgcttccgcttctcatcaacgatattggtttacggctgaaactcgggaatcagcttgcacgaggttttgaaacaatcgggagagactgacctcgtacacaagagggggaaatggtcgatagggaggcggttgctagcgatgaggatgtcacagcggtacaaattatacagttggaagatcaggcatttcgatcaaatgacgaggggagtgaaatcgcaatcacgaccatgcgacctgctcagatgacgcattggtatgacggagccatgtcatcagtcaattgcggcttcaagatcgcattctcgcagttttcagcatgagtaaccgttacaatcacctggcatactgaacaggagactgcttagcgatgcatttgatatcgatgactggccatgtcgcgtgctgtaggacattaacagcgagagcagcgagaattgtgaagacgacgacgacaatcgggggcgcgtgcaaatcgcatcttgtcgagagggccacaaaatgattcatagcctcctctctctaagctgattaccacctcagttctgctccaccgtcttcttagcctcgggaaatagaaaaagcctagcacgtcagatcttaccccgctttggcgagacgacctctggctttgtagcccagtactcgcgaacgctcttcaccgatgcttcccttagataggccagagaggtcgactctcgcgaatagaccgagttgccagagtaaacggagacattttcgatcgacacaggatgacacccggtgtatggttgcgaatccagagacgaatcgtcggtcgaaagctggtccggtttcttcaccgccgggatagtttcgtttcgtccaggtgaatcggaagaacgtttctctcgtaacctcaacgacgaagcgagactgcgaggcactttcgtcagcaaggatgttcacctcatcaaataggaggagacggaagacggctctacctcttcaaatccttgaggtgacattggacaaacgcttccccgggcaaccatccgttccgtcgaggtctgtccgcctttgggtcggtaaagttgtcgaaagaggatgacactaaagatagcaaggaagaccttcgttcgcgcttcgaacggtcgattagcgggacaggagggttcgagggggaccttcgaagtctcctgctgatcctgctaaagtcgatctcgatcggtttggcgtcatccgggctcgacctattgacggcgagggcgtgggccaccgctttttgcaaggcggcgtcctctgggtctgcgaacctggcctcatcgacttcgtcccgctcgactttgtagtcatcagacaaggggaaagcctttttcgggtccgggtaaggggtcagtctccgcggcgcagagttttccttgagggactttgaacgccacaacgacttgtcaggccgggttgggatgaagggcagggcatatgtgattgccattttgctagattaagtactgatttagggtgaagggaagagggtacgaatggaatgggaaggtgacttcagggcgaacggagcgggatacagaaatctccttctctgggcgaagcgatctcgtctactagctagggcaagcggaatgtcaaccttataactgtccggcccgcacgagacgacgcatgggtcgatcgaacgagccccttgaggaggctgagacatggtcgatggtataaaggaagactccttggcgtacgcgtacccgccgtcattgacattcgcgcctccgagctttacgtgaaacgtccaccgggtcatttctgcacgtcatgcggcgttcagatcgactactctaaccgacattgctcgttcagttgccgtagcacctccttttccttcttgctcaagagtccctgcaccatcttccacctgttcattcctttcagaccgtgaacgagctctctggcccgctccgtattcgctcgacctttttcgccgccggtcgtcgaggagagcaaggcctggtagatcgtggcgagatggtcgggctctatgagcgggtccaaccatacgcaagctttcgctggaggtatcgcctgggacgcgtcgatcgaaggatcagccttggtgaatctccataccggaccggcaagggctgactgactgtaaggatatcccaccgctcttcatcggtagcgctgtgcataacccgatcgatcatgtccaacccggagacgggcgggatcacaccaggcttcccgacctcttcgccccctgacgccgatcctgatggtattgtcgcccggctcgccaaatccgcctcttctaccgactttgacgttgaagcaggctccagccccgtaaaactcttcttggaccccctcccagccttcttttctgcaaaccctccgctcgacccgtttgtcgcctttgaaccgtctcgtgcatcgtctcccggcaagctcctcgaaggccccgcctcagccgtcttgccctgtcctatcagactgggtcgcggggtgaagaagggcacgactttgatcggtagctggaccccatgaggcggatccggccggatagggggtttcggggtggatatccggcgtgtcgagctaggggctagggagagtggagggacgacgggtttaggctcgtcttcctcctgttccgtgagagtctcctttgggtagactttggcgggcttggatctttctttcttcttcttcttgttgttcttctccagctcctgaaatttcggccaaaatccggcgtcagcgtgcaaagacagacgatgtagcgaggggccggcacgaccgacctttttcagactggccaactcctccttggcggccgagttgctcggttccagtttaagaatcgtctccagatctgaaacgggtccctcagttacgggtcagctcgtgcccagcgaccaagtcctcaagacaggccgacatcaaaagacccaccctggaccgccccggcctgttcttcctcgcccaattctctgcacgccaatgatctccggaagagcgccttgatgttctgcgagtgggagggtagaccgaggacggtattgcaatcgcgtacgacgtcttgccatctacaaaagccaacgtcgcgtggacgaatcagctcgacatcgtccatcggggaaagggcagcgatgggtagggaggagacggacttttcgagcttgaggtaagcttgagctcggttcaggagaggagccgggtctgtagggtctaatcgggcggcttgtgcatagtgacctgattgtaccgcaagcgcaacgtcgtttgtcctctgtcaatgccttggatttgcatgtgcgggatgatagaacgatgtactgacctatagcttccgcccatttaccctttttgtacgaggcattgccctacgagaccacgcaagtgttggatgccaaacgtcagttgacatgtccggtcacgaccgagttgccgactggatggagagggtgatcgagccagacggactgacggcttctctggcggcagctgcgcccttgatatcttttggtacgttcatctgggattagcacgcaagctgagactgttgtcagggttagatgtggtgtggtattcatcgatgatgatgtctatctaccctaccttatggtccctgtgtctggtcatcgttgtgtttgccaatcaaaagcgcgcgttgatccaactttcacttttctcgcgaaagagagaccaccacgaccaccactttgacaaaagacaatgtcatcgatcctatcatcatagcatctcaacacacgaccacggctacagccctcttttctccacgtcatatagcccatcatgtcagtcccagatacagtaccaacgaataaccacgaggaggatgacgacgagatcgattacaccgagatcgaggagaggtgagttgtccgtcaccttgcctggcctgcctgttcttggctgacaatcgtcaccacaaacccaaggtatcaactcgacatgctctccggactcgacaacatcctcgtcgtcgacaacgttcccctcgtcaacgccgacaggcgacaaaagctgctcgaccgtctccgacaggcgttcgccaaggccggagcgcctttgagtgggaaacaacgagaggatgagagttatgaggatatggagatgccttgggacaaggagggcgatagcaacaaggggtgagtcgagcagcggtaatctcacgagccagagggggtttggcaagaagacccaccccgaatgacgtcaaggaagacacacccacgctcgtgctgatcacccttttcacgaccctgtttcccccccgcccgtagtttcctcttcctcacctacccctctgctgccgaggctaccgctgccctccgaaacctggatcagaccttgttcggaaagaaccgtctgcacgtcaacaagtttggcgatatcgagcgatacgcctcgttgcccatcgaagaggggagcaccccgcgcggttgggtagaggatagcgaggtcgagccgcaggaacatttgaaatcctggttggccgatcctcaggggagggatcagtacttgacttataggggagagtcggtagagctcaactggatcggacgaggtggatcgggagaagccgccgtacaggccgagcccgtgagtcacgaaaagaacaacgtcgtcgtcgtcgtcgtcatgtcgatgccatagagacatggtcggcttatatttctcgcgtctcgtttccacgtcgtgcgtttagcgatggggagaactctacgtctcgtggtccccccagggaacttacttgaccacgctccaccgaatcggagtcgccctctggtctggcaagtcgttcaaaaacaccgtctcgcaccgattcacccacccgggcgtcaaactgtttgatttctctccttgtgaacaatacctcgtcacctggtcccccgactcgatcgtccccaaacctcccaaggacgagaacgcgccccaggatcctcgacagtttggaccggaagacgagggcaaccagattgccgtctgggagatcaagaccggactcttgctccgaacgttccccggtgaaaagccggttcaaccggctcccgtccccgcgggcaccaaacccgaggacatgcccgccccgagaaaactctcgtggcccctgctccgttggtccccggatgacaagtacgtcgcgcgatgtcacctcggaactcagatctcggtgtacgagctcccctcgatgggattgttggacaagaagtcgatcaaaattgacggcgtactcgatttcgagtggtgcccggaccaagagctcggtgcgagcaaggagaacatgtttgcttactggaccccggaagctgccaaccagccggccagggtcagcttgatggcgatcccgagcaggaacgtcctgaggtcgaagaacctgttcaacgtcaacgacgtgagttttccccttatgcgaaagctgttttgtggtcgagaccgtcgaccgtgctgactcgtcgccctcgcactggaccttctgatcacagtgcaagcttcactggcaagaccagggtacttacctctgcgtcaaggtcgaccgagtcaagagcaagaggagcaccttttccaactttgagctgttccgagtcaaggagaagaactatcccgtcgagacgatcgagttgaagggtgagtctcgagtttgatggaccgcgccgtccagttgtcggagcatggaacgaagtaccaatgcaagtgttttctttcatgtgccttggcagagacctgcacccagttcgcttgggagccctcaggcaaccgattcgccgccatcacctgtgccgaccctaacccggctcacatggcccccggtgtcgtcctcaagaccgccgtctccttctactacctcgaccccaaaaagggcgacttcaagatgatgcgtgagtctcgcaaacgcgtcggcgcgggccgagaggatcatcgcgctgatttggcaatttgaaactcggctcgttgatgacctctaggtgaactcgagaacaagaccgccaacaccctcgcttgggctcccaagggtcgattcatcgccctcgccacttgcggctcgtccgtcaagtacgacatcgagttctgggacctcgactttaccatcgacgacaccatcaacaagcgtgacaccccggaccctggtaacaacatgcaattgttggccaccggagagcactttggaatgaccgacgtcgcttgggacccttcgggtcgatacctcgcttcgagcgccagtgcctttaggcagtcggtgagtcgcattcgacgacaaggtgcgatggtgcatttgctcaatactgactacgacgctcgcctctcgtacagcccgagactggatacaacatctgggacttcaagggacaggatctgcaaaagcagcctcaggacaagttcaagcagtttgtctggaggcccaggcccgccaccatgctgccgaaagaggaccaaaagcgagtcaggaagaacctccgagagttcagcaagctgttcgacgaggaggatgccgccgaggagagcaacgtctcggccgatctcttggctcacaggaagaggctcatcgacgagtggaacgcttggcgatcaaagcgggtcaaggagctcatcgccgagaagcagaaagagggcgccgatcaggtcgagagcaaggccgacgacgaggccttggagactgtcgaggaaatggtcgaggacatcttggaagagtccgaagaggtggtcgcttaggttggacgggcatggtcttgtcatttgtaatgagtacgagagagcctccccagggatacatggtattcgcaaccctccaccaaactcggccggctggaccgaatgaccctaaagccgatctccatggtacatttcaaagcacagatcactgacagctcactcttcaagttgcaaaacggcaatccatcaggacggcagctcggatcatttttgaaaggttggaaccttgatcggtggcttcaaacgtggtcagggtaccttagcgacgagttgagcgatttttccacttgactggggacagattttgggagacaaattatcttaagctgatttcgatatcccgtcacgaggggtctcgttgcgtgtgtcacattgtcgttcgatgttggactggtagaatgttaccgtcaaggcgcttcacaaaggcctgattttgttgtgaaaacgagggaatcgaacatttgagtacaagccaaccagacggacgtgctacaaccgcctagtcgcgcccacccttgttggcctgtccaaccaaggaggcgtacaaagattcgggtttcgctaggagagccgctggactgtcgtattcagccaccgtaccctgctcaagcaccaggattttgtcagagtgagcgatactgcccaatctgtgagcgatgatgagctttgtgacgtggtcgaaagctttgcctcggagaatctgctggaccgcctcgtccgtctccaggtcgatactcgaagtcgcctgtgatgattcgatgcaagagttagcttccacacctgttgcgaatcgtactatcggtcggcgcgcctacctcgtcaagcaccaagattctggtgtttctcaaaagcgctctagcaaagcagacgagctgtctttgtccagacgagaaattgcttccaccctcagaaacttgtgcatccagaccaccgagctggttctggacaaagtctttgaggtagctctgctccaaggcgtgccagatgtcggcatcgctgtggtcgccgatcgggtcgacattgccacggacggtcccctcgaagagttgagggtcttgaggaatgatgcttatggcgtgtcgcagatccttcagtccgatagttgtaatgtcaaccccatcgatgaagatttggccaccggatggctcaataatgcggaacaaagccagggtaatcgtggattttcctgcaccggttcttccgcatatctatccacagtgattgtgatccttgatcagagaagggtgaaggctttcgtcatcgagctactcaccccgatcgtgtcacctcccttgatatggagattcacatctcgtagggacgggttcagttccggtcggtatctggcggtgtagtttttgaatgtgatagtcccttcttgcggccaagaaggagcgggcttgttctcctcgatctcgtaaggcgcttccggggtaagatgtgtgtatcctagcacacgctcgacactggtgatgttgctctctagaaagataggcaggcagctcttcgacgtcagcaaggacgacgttcctgcgtcggacaacgcttttaactcaccaacatcactggcgcttcggacggcccagccgaaagccccgctgacgtttgagacgtaaacgaggatgattccagtcagaccgctgtcgaccttgcccttgccaacgacaacagagaggaccgaagcgagggcagcggctaaaatgaggaaagatcccaggctttccaatcggacctgtttcacaagggcaggtcagacaaagcgcaagcaaagggtttctgctcaacaactcacagcaagccatcggttcttgagggtcagagaatgatagcgtcagctgacctaacccacttagtaatcaatcaacagcgcttcccactcacaacattctggaaatatggcaatgaagctcgtcagtcggggagaatttctgctcgaggtaaaggctgatacgactaaccattgcgggcatgaaacagtgctggttgcgatcgagacgggcctcgtttgccgaactgaatcgctgcacttggttgaaagctcgtacaatcggtgctccggacaaactgcgagagccatggaaatcaagggaatgagcaggatgcagcaaggaccccgtataaagatggactaacgattcgttcagccacgagaaaatgggagctcgagaaacagcatccaagcgtttgagctctcgagaagtcgcgaggtagtacttcatgatcgagcggtagacaaatgcgagggggagcacggcaaccaatacccaaggcgctccaaacgcaatcacaccgatgacacctaacacggaagtcatggtcctattgcacaagtttgaattagcgatcgcacgttggcgaacaaactcgaacgagaggacttacctgaagaagccgctgaagactctgacaagaacttcgtctacaaggagatgcgcgaagcgtgagcgaatactgtggcttgcgtcattggggtacctttgacataccgatggtatgcatatcgcgagtgaagatgttcaataccctgtaacgtgagagcaatcaatcagcaagaggtgtcgatttggatgggccaactcgactgcttaccgtccttgaggtgtctgttcgaagaagctcatgggagatcgcatgagagcggcaaagctatgggaattgaattgcatcagcgaaagtgtgggcacgtcaaccagtcgatctgagagcgacttacctcttgtcgtgcatctgcttagagcaccggattgcacataacacttgtagcaggagcgtagcagctacggagagagccgaggagaggactccgatacagccgtaccacagaagataagttccggtgctttggttggtaccttcggcgttgttcgcttgagcccagtaccgcaagatcaagttaccggcaatggacgtggcctgggcacccaagatacatagtccgaatgacgcaacgccgaatcggctagcagccgagatgtagtcgcggtagacttgacggttgacggctcccttttcgcgggtttccttcggtcgggaatcttccttcaggtctcgaacggcctcgatctttgcggctcttgtgctcagtactgatgcgcgcctcattgtcgcgatagacatgcgcctgtccatcttagggatccgggcggcatcttgttcgtgctcacttgcagcatcgtcggcttcgtcggggacatcctcgatcaacgacggcgattccgcagcctcatcttccttgtgttcttcttcgggctgattgcccatcgtagtgatgagcttgtaaatctcgctgtcggggttcgccattgcctaggagaaaagctgctcaatagggtgaccagcttggcaaaatgccagcgcaacatgctcacctgagtgtaagaactggtctcgaggatgacgcctcggcgaagcatcacaatcttgtcgacggagggaagccaagtgatggcgttggtacacagtatacgagcttttgagctcaacagtccctgagctccaaaaacgttgtcccagacatctaatggtcgcgatcgttcagcaaatgagaggtccgccctgaacccaaagaaacttacgtttcccgacgtgcgcctgcatgacgaatttgcgatgtcagtagggagttcagaaaccaaaacttggcagaaagtgctcacatcgactgcagacagagggtcatcgagcaagtacaagtccgctcgggcgtagacgcatcttgccaagctgattcgagccttctgacctccgctcaaggaaacacctattgcacgcgaaattttatcagcatgcgatattcttttgttggctgctgcagcgttcgcctgacctttctcgccgacttgggtcgcgtcgccctcggccataatggccagatcaggccgcagcgcacatgcgtccaataccttttcgtagaaagccttgtcgaatttcgtaccaaagatgatattatccttgatactggcagataggataaatgcgttctgaggtatcgagtaaggccatatcagctttgccggtaagatgcggatcgcagcgttgacctcacctggttgaaatacgctatgtctcctcgtacagtgacggacccatcagtgcgcctcatttccccgactgtaacacgatgcagaacaatcagttccgatcactgataatgacacgagccctcatcaggcttacgaatacacgacaacaagctggtctttccgtctcctactcgtcctaacaccgctaccaactcccccttgttgacggtgagatcgatctgttgcagcgtcggctgtgaatcttcgtcagaccattggaactctccattctcgatcttgacgacttcttgtcctcgtcgaggagtatcgtatccgttgctcgcatcggggcgaatgataacacgggcatccttttgcagctccttggcctccaagtagctctcgagacgagtcaccgatacagcagcctcgatgatcgagctaatgatgttcgagaatactccgagagggaaagcaagcaattggaaaagggagattgcggggaagatcttgtcactggtcagagggtgagggctcgtcaaggcgtaagtagagaatgttccgagagcgaccaagaaaggcgtgctggaccagaagaaaaaggacatgctgttgttgtagccgattttcttgagcattgtcagttcttgattgttccggacgttcaagactttttccgaaaacgccttttcccagccgtacaacttgatactcttgatgttgctgaggacctcgttcatcagtcgggtcctcttgtccttgttcttcatctgctccttttgtagcctcttttgtcgtcgagcgataaccgcgtttacggggaggctgacgaccatgatcgcgactcctacgaaagcttgccatccgagcaggttatacagggacacgaaagcgatgatgatctgtaaccggagcgagtttgagcctactcttggtaaaaacgattcactcgcaatccactcacctggaaaggtccactccaagcgatgtggagataggtcaggagatcggcgattctgaccgtgtcgaccgattgcaagttgacaatgtctccggtggtacgacctcccttttcaccgttactgaggatcaaactcttctgatagatgagcatggccagggcggatctgacccgcatcgtgctctcgaatgctcgctcaaagtattggtgcaacaggaacgtcgccaagttggcacaggcgaacatcccgaacgcgacgacgaaaccttgaatggcgggctgaggttgagaatgctccttcttatcggtcgtggcgtaggattggacaaagctcaagagcaaacgcagtagctgaggctgcaagaacgacaggacatcgtatgcggcctttagacatcccgcgatgatgaacgggcccccaaatgccttgaagatggcgatcttgagcgacgcccgcttcttttgaccattggcgacgtgagaacgttgttgctgccaagcggcactcaatcgtgcattcaaggcttcggcggaatcgctgggggggagaggccacatgtcatcctcctcgatatatcgacgagcaccgagtcgcatcagagctgtacatccgatagactctcagtattccgccagcacctgaataccgcacgacctagacttacgggtcaagaaaccgaacgtcaatcgagagtagatgttggccttcaatacgggactctcggcgtgttccatggcaatcttctcttcgatcgtcttcttggcaggcctgtcctcgccactatcgtcctctccgctgacttcggcaatgacgtcctcgtcatcgctcgcgaccccctggtaccctcccgacctagacctagacctaggcttggtcttgagcttgttggcctttccattctgggtctttccgttgccattagcataatcgatctcctccccgatccggatcccgccttgttcagggccaaagatgtcgacgatccaggccatgatcccgaacccgacgctgcaggcaaagagggcgaaactagccttgcccgtcttgttccacgagccgtagatgtatccggccccgtaaaggggcgtcgagtgatcctgctggagcatcgagaatcgggttcggaaaacggtcgcgagggcgatgaggtagacgggccaaaagaggaggatgaccgaagatgatcgtagcgagtagagatggttgaaccatgatagggcggcgaggactgggatcgccaggaggtgcaggacggaggggagggtgatgatgttcttgaacgcatgaggcgtatgtacaaggacgaggacgaggtgtaccacggctgtcacgaaagcgatgatcaggaagatctgttgatcgaaattccgatgaccgatgagcgaaaccgtgtggtgcgacaaaaagatgagaatcgcatcgctcggtactaaccatcttcatccacagcctagccttgctccatcctgctcttctccgtttgggcccctttcgaccgactcttgctacatcgatgattcctgctacgagcaggaccacgagcggtgcaggcaggacggcagcgctctcgaagcatggcgtgagatcaaactgcctgattttggagatgggcccatagccttcgggggaataacacagggggtatcgatgagctcgctcatgttgatgatggtggtgctggtgatgttgaccgtgtttcccggtaaagtctgcggtcggcgactcgttttgtgtcgaggcgatcaagacgtcagccaagaatggcaaccaggacgacatcattgtggtcgaggtctttccagacgctagatctgaggcgacgagagttcgagatccgctctcgattcgatagcttgaacaggttggactgctgcctgcttgctgtctgtcgatcgagtagacctttttcccccgactgacctaactgactgacttcggtagtcgtgtgcctcactcagtggtctcgatgtccggcgtgaacctgtttctctttctctcgattataattacgccgcacacccagtcccaccacccactctactctcgaacttcgccgcgggatgaccaattcgagaaacattcgatcggcctggtccgcggaaggagaaacgccggggcagaaggcagagggagggggacggtggcgcttttcaaggcgggcaataatgaaaaggtggaggggtggtaccggtttacaggtgtggaaatatatttccggtcagatcggtctggagcgcagtcgtcgacatccgaaagaggtcgcatatttgttgcacaaaggcttcgttagcacatgatgaacggccccgcttttggataatagggaaagaaaggatcccctgatcgcgctggggagaaccggttttgcaagccgagcaagtctgaagtgaaagcgccctggtcgatcaaagaacccttgcgaccctatcatcagaggcaaggcttcgcgagaactttagaagtcgaaggacatgttcagggaggatcctgttgacactgatgccctcgccttatgagagcgcgatcgcgtgcgcgcgccaccagaatccaaactccacctcgtcgtcctcgccccgcgacctcgttttctagccccagaaggggagtgagcagaggacatatcgattaacaatccacaacagtcgtaacgtcgcgtcgctttctctgcctgtcatatggacagacgtacgtacgtgcgatccacccagcctgtagactcggacgagactctaaaccggctccgagaggtacataccgatcctggtcgatctgggcgggaggtggcagtagtaggtctctccggggtcgttttcctgtatgcgtgtgtgtcccttgttcgtccatttattcggccttgcgcgcaaaaccctatccccggctccagccttcccgcccggaagtctcgagacctgggttaattacgttcgatagagcatccgtcgcactccagtgacaatagtgttaccatcaaggtctagcacatcgaccaacctcttttgcacttgctcgtgcgtgccatccatctcgatccatctgctcttcatatatcctctgcaagacttcccaagcaaaacacgctcgacctcaactagaagctagaagacgcgttacgaagacagcagtagcagcagaatgaccatgcagagcatcaagtgtaagtcgggactggaaaactagtcctcttgatctcgttcaagatgttgggcactgggagctggcctggtctgctcggtgatcaaacgctgcatcccaataccgagaccttacctgggtggaggacctcttcgcgagccgagccgatcctacccttacccaatatgcacagcccggctccggcttctcttcccgcatagcctctttactgatcaccgcgtctgaatcttccgattcttcttgtctacaggcgtggtggtaggagatggagccgtgggcaaggtgagtccggcgtcgacgagcccttctctaaaatcgacccgactgagccctaacaacaacgattatccttgtcatgaatttatagacctgtctcttgatctcgtacaccacaaatgctttccccggcgagtgagtgctcgtcagaccgggaccaaccggttcatcgcaaaggtcgccagatcactcagacgaagaacctctgtaccccgccttcgctgcctcactcctcagatacgtgcccaccgtgttcgacaactactcggccaacgtcttggtagacggcaaccctgtatctctaggtctttgggatacagcaggtcaggaggattatgagtaagtcggcgaggtcaaacttgctgatagccgtgcaccctcgacatcggctgattcatgacccgttatacctgctgcatagccgactgcgacccctatcctaccctcagacaaatgtctttttggtctgcttctccatcgccagtccacccagtttcgagaacgtcaagaccaaggtgagtcccataggctatccgagccgacgtggatcacttgcctaacaagccattgcgacatctacgatagtggtacccagaggtctcgcaccacgcccccggcgtccccatcatcctcgtggggaccaagttggatctccgggatgatccattgacgctccagcgattgaaggagaggcggttcgcacccgtaacgtacgctcagggttcccagatggccaaagagattggtgcagtgaaatacctcgaggtgagtatggccccggagcctggtcgggcggagtctatctgtggctagcctagctgatacccttctcgtcgaatccctctcctaggcttcatcgctgacgcaaaagggcttgaaaaacgtcttcgatgaggcgatcaagaccgtgctcgccccgtctgataggagtggaggcatgagcaagcggaagaagaagaactgtgtcatcctctagacatggcattagtatgtcaatttcagaatattgaggcacggtcagagatgcggaaatgagatgccaaggaggtcgaatatgatggatgccgcgagatgggggtcacacgaaatgaagtgggtcccccccgggcggatggtgtaaaaattcagcgcgagaattactttgtaaacgtatgaagggggacaaatcaggagacatggatcctatcaggcaaagaactagacgacgatcactcggcttgagtctatggactggccatgtgaccatgagagtgaggaacagctgcgtgcctagttgtaatctcgctagactgggcctggtgcactacggtacatggacgcgttgcacaatttcaaacggtcaggggtaccaacgatctccgtgtgaccatcccctcggcagcattcaggcaaatccaacgttactttgggttggatgatcatgctcggaacgctccgcggaatccgagaacagcttcgagaatacggttacgtttcattcaactgtacgtcgatcagaatggtgtagtctgatgataacgccgtgtagcagcaagccacacaggttgtcgtcgtacgtgccactccccgaagtcttacagggatcgaggacccccactcggtagccagcttgatatggaccacctggggctgtaaatgacttgcgcaacttccggccataccaaagcgtttgattgctctatagttcatgctgaatcgctcgtaaaagaaccgattcgtatgtgggggttaatgactaaaagactctcagcagctttgccggtgaagaaggagtgttgtgataatcgagcagagctcgccctccggcgaacacataggacggcgggatcggggatcatacgccaaaagggtagacttggtttgtacaatgaggatctggcggttcatcgaataattaagcttggaagagtttcgagccccttgtgcccaccgtgacaacaagcgttccaggttgcggcctcgctctggctcatgcttggcatattgttggcatctcgcagagactgtgagctcggcggtccaccttctgacctgcaggacgcatgtggatagacgcgccgtcggccgtttgtctagttggtgataatatttccccgagggctcgcaaggcggagacccgctaccgattgagccaaatggggatgtaggcggactagggtgttcttgttgatttgcgatgcgacgtaaaactcgccaaggagaggattctcgatgagtctggatcaacgtgggggtgctccagcatccgcccgaatgatgctcgagatatgggcaggtctattgagttgtcggtccctgttcggcaagtgatgttgcgtatagacacctgagtgcctgggctcggtgtatgcgtagttgtgttacggacaaccatttggcgtgaagattgatgcaagttggtccgatttgatcgtgttggctcgtcgtcccaaaaagagcccgaggtcgagcctgcagttcgtccgttctctactccaactctgtctcctcgttgaccaccatctttctcgacccagtcttgtccaccgtctcgccaacaatgccggccttggcatcgatgacctccttctgctcctcccccctgaggttcagcttcttgaggtccttctccagctcggcctcggccttgtcgtcctgctcgacaggctgctcgccctctgcctcctcatctgtctcgtaatcctcatagtcatcctgtcgagtgccagacatagctgtttgagcttgtattcgataacatagaaagatgcgcccgtccactcacccattcgtaaatgacccgaatgatcaggctacagctgggacatctggccacctcgtctccgtccctcagctgactcttggtgatctcaaaccgatcgccacatggacaaggatagtggtacaggccgagtttgtcgtcccagacgaaatcctcgatgtcgatctcgtcgtaaaaggtttcacggggcatggcggatctgatcgcttcaagttttcgctttatccttcgacaagcacagtgtatgcgaggaacggagctgaagatgtgtaccaagcaccgacagatagggacccaaaagcaccgaaatactgatatcgattgaactgagagggatgaccgagaggacatcagcgggtcgttgaagtgttgaaggctcgagaatgtgtccaacctttcttccttgcgacatttggggcaaaacggtaacgtttgactttcacgtgatcgcgcaaatgcggcgatgaccgacctttggaatggccgtctacgaaccataacgcagcgtgcaatcaatcctataatgccaagtagaggcacgttcaacgcaatcgacaggcatggacaaggattcctccattgctggagtgcgtgtcataacattgattgatatataatttggctacatttggtgttcgtcctccatttcatattccacgtcgtcctatgtcactgggttcagtcctttccgggaacagcccacttggggggctcgtccttgccctcgtcctcgagcttatcaccctcctccttggctacgggatagaaacggacgatgtcaattttggtgaatactttgggactataaggctctcgcttactcttgtgaacagacttggggtcgtgctcggctaagaattaaacaatcgaacaagtcagccgcgccactcccgctctccacgctatccagttacgaaacttaccaggagcgtagatggtaaagcagatcaagggttcctttccagtgttgataaagttgtgcttggtgccttggggtacgatgacgaggtctccagcgttgaccatcttctcctctccggcgaccacggccttgcattgaccctgggtgaagaccaagtgctggtcgacgtggtggacctgcagacgaccaacaaggcaagagaaattcagtacttccagtcgggttgtagcgtcctcccaactagactaacctcttcaccaatgtcacctccgacggggatggtcatctcgaccaattgcgaggactgaccagtccacaagacccgacggaactcctcgctcttggcggggtactccgtggtcatcttagggtagtgttgcatctacggattaggtataaccgagaaatcatgtcagtcgtggcattccgtggcgatcgggacctcgacgaccggactaaccttcttctcggggagggacgtcatcttgcttgctgatacggagaacgcacgagcgtacgaccgattgggtgatgtccgggcgaggcagttgttgcgaagaggacaaggtcgggcgatgatgggcgaaggagacgtccgacggaggcaaggcgatcgcgcggtcaatggagtcttcctgatgggggtcgcgatggttcgactagagatggacgagaacatactgggttttctaccttctatacgattgtcgggtttggtgagaagggggctagtgattgtatatggttgggggtaaaggtctaagcaacagtcactgacctcaaggcagttacattcctctcgttgatgttatatgaagggatcatcgagtgggctccatccgatcgcgccaggcgattgtcaccggggccggtccgcgatttcttcaagaaaagccaggaaccatgacgtcacgacaaatttggctttcttaagcaggaggagcggggacagcaggacattcggatcggagtttcacctcgtccgctatggccggtcccatgaccctaccgtccttctaagccaccttgttcatcgaccaatcgatctatcgctctatcgatagctctattgcgctattgcatcgatgctcccgctttcatcgtatacaagccacaagggtcggctcctgtcgttgcaatggcagagtcgaaaactgatacacggtcgatccgggacaaaggaaaaagaggatcgagatattgtccttgcaaactctatgtgtgcctatattcggcttttcgtacttgatccttcactgaaatcgctcatctcagtggagacgtcgtgttgctaggggctgcaatttggaggtaacgggtggatgttcaaagtcaaccaacggcagcgactcgatgatctcttgggactctgatcggatatcgagaccgagctgggaggaaccgaaggaagagctaagactcagaggagcagcagagatgatatattctttttcgggtgaagcaggtgcccttccagtggccgcaatcgtattttggttcaggtcgagcgttggttgaggctgagatggtgacgatgcgacaccagcttgattttggtggaacgagccgaacgtggagctcggtaatttaggagcaggccatcctcggaccgactgactggtacccagaggtcgttgatccccaaagacgatctcggtatcgctctcgagctcgtccatctcgtccatcttgatctcctttagggaaccagcgctggatcccgatctcgagccaaagccataagcatattgggacgacccgctcccggacccgtggaccgaatgtgtatgtttgctcagagtaattttccgacagaaactgtatacaggagtagccatttgatttggtaagcccgagtatgacttgtcagctgatcgtctttgctaaccttttaccgcactcagggaccgggcagacgtagggtcgactaccactgtgaatcttgcgatgtcgggccaaggaggaagagtcggcgaaggctttgccgcatagcacacatggatgaggacgttcacccgtgctgattcgtggatcgaaccaggatcagcacgacgtatggcaatccatgagaaatcgaaggatacgcactgtattcgcatatgcacggtgagagccgatttttggatgaacctcttcccacaggccggaagtgggcagacgaatggtctgttgggaaaacgacaatcagcagggctcttgaacgtctttgacgatccggtgactgacctgtggttcgtatggatccgttcatgccgtgaacagtcgcttttcctcctaaaacgttttgtgcaccggaagtgatccgagatttcacccatcaatacggcacgacgatagtcgggatggacagggttgtagcggcagattacaggtcggtcttcagctgtcatgtcgtcgtggacgagctatgtttagaaaaccgaaatgtcagtcggacctcgctttgctcgaaacgaaggactgcaggcgactgacatcgagaacgtccatatcgttggcaagtgcgagatgacctttgttcgttagttgtatcggtgcaggagctagaggaagagctggaaggtccgatttcctcgaccttatattgtctgctctcagtgagatcgtgaacggtattggtggtgtgcacgtcaccttcgggaccaccacggcaatcgatggaaccaagtcgttcctttgcagtgattcaccaggtagaatgaagtgatcgtttgttccgatactatccgatgaagggcaccagggtgaggaaggagacagctggggaccctttcgaacgagcggcacccaggcaggtcgtgctgatgctccaccctgagtgaagagcgtaatatcaccgaacgtccgaggggggtcaaaggagtggaattgatatggtgtgctcaatttccgattggaagcgtcctgaagagggtgaacgactggctgagcgtggttcggcacttccgatcggttatgggctgagttgcaatgtgcacgatgaagagcctgaacgcgaccagtccgcttgggttcggctcgagccacccaggtgagttggcgaggcaccacgctagactgatgcagtagcaacggaagtcgaataggtggggtcttggtcttgcgctttgaacaggttcccccttccgttttgaagaatgtaggaatcggccgcaagctttcgctatgagcgctgccctggccatagtttaaagcatcttcctccttcatgttgtctcagatgttcaagaagtcaatttccctttcaacgaatcatcttcctttacgtccggtgactgcggcaatggccgtaaacgtcagcgcagatcgaagatacctcatacgagatcgcatttcacactcaggaaggtttcggacgacgcgatgtctgaaagaaccgggtgtcctttactgtgtcctttacgacttccgaaaggaatccttgtccgtcgtagcttatgacgtggaaatcgatctcctcgcgacggggctgtcttcttcgctgagtcttttctgaaggagagcactggcactgcattcatatatatacacggcacattcaagcccaagctcatcagtagtctgattcaagtggtatcttcctacattcccatgattacgtacgaagtcctgtccttgtgcaggtatggtgaagttccgaaggaggcaatccccgagaaacgtacggtcgaatccacgcttttccaatccgaaatgcaaacgagatatatgacagcagacttgtgtcgtcgttgcacgccgatggaaatgcaaagtggtggtctccatgaagagcctttcatcatgcatcatggttgtagcggaagcgtctgtgatttcttcgcagaatgcgcttcatcctcgcatcgtggtacgatggtccatgtaacaagttcagccaaataaaactctccgaggtcgggaagtatagaaacggccataacatatgtccgaacatcccaaaggacgtgtttcgatgtcaaccaccgatccacctgcgccagcaatccgcacctgaccttcgctgggcgcggtcagatcgacgctgatcttcacctcgcttaccgggagtaattgaaactttcgatggcggaatcttgacgacagtcagactacgcttctcaagccacgggtctgtacaacgccgatcatcctttcgggcttgaaaggtagatcgtcagtgaaacagcggaagcaaaattatgaaagggtttacgcagcggttttagcgattaatcgctcgctatcgttcagactctcctccactcgcctaacactttgacgaaaacaaaccgaacccgtgacctctggcatccagcatcgccactgtatatgcactcggtgatagggacaaacggtaaagatggagctgaaacccctggacacgaccctgacggaacgaaaggctcgctatttccccttgccgcggatgtatcgcaaaatcgcgctgagaatcaccctcctttcagacagactgacagcctgcacgactgaaagggaatctgtcctcgagccgcctcataagatcactctgtacgaatctatgctcaagctgcgaagtctgatgattccggaccactgaactgtttgcgcatgaagagctccgacgagcaaatatgtcagggcctaccaatctcagcttcgtgcacaagttgttcaacagcgttcctatcatcccgtaagtggctagagtataggtatcaagttcgctctagtctcacaagaagtcccttacaccatctccttttaggaaaggtgctccgattgaaggctcggatccgtctgcaaggagcgatgtcctatccggcgagaatggctctccgccgatctcaacgatcggatctctcaccctcagcacgggcaaactctcgggaacagacatcgtatgttgtaggacgtggcaaagcgttgcccgattaagcctcctgacgcatgatgaacagatggcggcgtccgatttcctgtccggaggcagagcgggtctcataggagacaagcagctatccatccaaaagaacctatacatcgaaaccaccgctcagcagaaaatcttaggtttgaaagaacttcgtgggttgtcgatatgggatccctgactatgagggaaagctaacaaacgtttacgccaggacgatgcatttgccaggtcgagaggcaaatgaaccggtccgttagccgtgatctgaccggtgctagggccatggccaccggggaagccatcctccaacccaaactatctgccagcggaagggaaacgctcgtcttcgcttgccaagtgcttcagcatttggtggggagcgaggacaaggcgctgattatggctgacagggttgagatctggctgccagcggcggcagaactcttcggtgagtctgccaccacttcgcaatcgtacctgtaagctcacgcgaaagatgctggcgttttaggaagagcccttggagcgctatttcgtggagcggtcgatcaagacgaagcgataccgcatagtatctacggaaacacggtttcagctctgctgtaagcctcacgatcttgtccttctattagtacacatcgtccaacttgaagcctttcgactcaaaggaagcagcttcaagccgaacctcgccgcttggtttgctctgattgctcggccgacaagtctcatccgatgagtctcgcgcaattgaagctgcttgtcattctcaaagtacatttgtcaatgtggaacaattcccgtctggctgccgagggggtgatcagcgatatcatctggccggttcaggtcgcgctccattgctgtcaggtacgctacaagagttgtgacccccgcacccgcaagactcagattggctcgtatgaaaacagaccttgctacggaaaacttctaacaaaatcctcgcccaagcggttcgcgcgcaccgtaccctcaaggtcaaagctgccaagggtatcgaagtcttagctgtgaccagtttcgatgcggcctcgagcggattggcccgtccgtcgaatcgtctccgcacaaatcagcaggtggcttactacctggagacgttggcgacactgtggtatgaatcggctttggtatgtcacttgtcctcccacttcgaaagccaccgttggatacaaccctgaaccaactgctttcatagacactcaggtacaagctgagctcggtgcgtcgggagtactacgatgtgcggactacttgggacgcaatcacgtcggtcgtgaaagtacagatgagtgcggagacgagcaagcaaatatgtgtcctactacctcttctcgcatatgcgaaccccatatcattcggtcatttcgctctccaagacgttgtcgcggtgttgacgtcaaaccaagcgcgcaagaaccgtgagttctacagtgtcgaatcgctcccgttataccggtttggcgtttgaaccctggaatctatacagccgaatacatcaaggtattgggtaacatcatcaaagcagtagggactagtgccctcatttgccgcaacacagtcttcgaattcatcttgcagaatctcgaagatggcatacagtgcgtacaagcatggcaccgatttatcatgacgagatcagctgatttccacatgaacaggactgagacctgttttgaggctgctaaatgcttcatgctcgcttttggcccttgcgctgcttcgtacttgtcagaagtcgtgaaccatgctcagcggatccctttgagtctcgcgcagctcaggctgatcaccacaatcccggctaatgttcccacactgcgaaggcaagtacacgaatacatcactaccgagatcaaacagaggattgctggtaagcagagtcgctgacaatgtatgcggtcgagtcacactcatatcgctgcatacttgggtattcgatgtcatcaggtggagccactccaatggtaagcacatcttgtggatccacccggacgcgattcagctcatagcccgacaaaactataggccgctcaccaatgggtggcattactgagggtgctccctgaatacgcaaatcaatgttcgttgcaaaccgtggctagatcgaccggcttgacatatggattcgctgaaatattcgttcccgacctacgcttaggcgctgaagagatcgatgaggacatcactcagctgattgttaaggctttaaaacctacaaatccgctcatcgtgatcgaggagaccttgcagcagcttcgccatcccgcattgatacgggaggagggatctcccgtcctcgtacaggctatccttgatcttatgcaagagcgtcgaggtcagtcgttagttagaaagttgcgactggtagatggactaatagtagatatggaagacagaacctcgaatgctagaaaggtcgctggccagactgtcgcagccaagactccgcttccagatgcaagcagtaacactgcctcttttgcttcagctgggcacgtcagatatcgggctacaaagagtcgtcgcctcgcttctgacgatacaggcggcaagattcccagctctgatcgtgcctgtgctgcggagattcatccgaacgaccttgctgagaatcgacaatgagatcacgaacaagtgagttgaaagccaatacatcggccgaacgcaagttgatccatttatttgaagtcatgggtcaacttcgagcgtggcacttcagttactagcgactgtttgcatagcaatgtgagccccagtaatttatgaggcgctttctgaaacggcctctgaagcacttctcgatagaccctcgcttccgctagcgctatctgagatgtattcccgaccagtcatctcccttctccttgctgcgttgaaactatacgaaacaatcggtagagacgccccaacggcaatcacgtgcttgggcaacctggccaaacactgttcgcatgtgtgggaatccaaagacatcgaggaagctgttgaccaacttcgaaggctctctaaaccaccacacgacagcggcgattctacgcttgcactggcctgcatggcagcgctgatggcgataccacaaagtagaacgctacaagacggcgtgatgaacgagatgttcggcaccttccttcagcaagacgcggtactccagcccactgtcaaatgcaaagtcatggcggtagttggtgcggtaggaacggctgatcgcaatccggtccgagaccgcgaccataatgccgctctgaggcgagaagatagtgagagccattgaattcctgccttaagaaagatagacccgcttattcacatctctgacaggcctttatgatgacagacaaaggagaagagtgtccacagccgtgttgcgcgacaaatttggcgcttcatccatcgaatatcaactgtccatcatatcggataatctactgacgactgctaaatcgcggtcgttcgcagggaagattgccgtatggagcacgctactcaagctgtgtctgatggtaccagaagaaagatacgccgatcgcttaccggatattctggaagaaatcatatcccaatacgaagacaatgccgggggaaagctcatcaagtcgcaccgatcaaagctattgatcctaatctcacaagctatactgctcaagccagtggggtatgatcaaatctggccgacgctgtatcagcgattggtcaagattgcagaagaacccgatatgaagtcatcggatgcgtcagggattcttctcatcgtcctctcagtgctatctaaaggcagaggtgatatcaaagcggtcgcacgccagttgattcccttgctactgaggatacttgagtcggacagcctcgatacggctacgatcgtcttcgctctcaagctcgtggctgtcttccaaagccatacggatccagtcatcggaagcattgctcgccgtctcatcagacacatggattctgctgaggaagtcgtcttggaggcttttcggctgctggcccatctagccgactacgtttccctgttcgaagccagtctgctcatacgagaggttctggaatcacccgcattccttgctcagcaaggtgaagaggctttggcttgccgcgagaaggtcagcgtattgtgtcatcttccagaaccggtcatgctgatgtccaaaagtagattgaaagctcgctttccttctctccggtagtctcgcaggatttgacattcgcagagtatcccgatctcagaccttatcaagacatgcagttttcgaatttggctctgacggaggcggaccgagctgatcatgccttcgtcggttacctctgggacatcgaagatgttaaagatcatggtgactggcaaggctgggcaagaaaattggaacaccatatcgtagatgcctgccgggtcgacatgatcaaggtcgtgtctttagtaagccggaatgtgacgtgaaccgtctgttgtcacctcactgatcaagtggccaatggtagttgaagcctcaagtaccgaaaggtctcttacatgctggttttatcgcttactatgaggctctgagagacgatgacagagtaggcgaaaggatcttctcggtcctcgatatcgccgctgagaccctttcaatgcgtcgtatagaccgtggtccagggagcgatcggaaggattgtgaccaatcgagacgcaccagcgtacgtaagggagctttggttgagcatattggaatttacgcagaagaccagcgtgggaagattgccagtctcgatcttggaaatggctcgaaagtccttgtctcaggaaaaacgccgattgtctgaacgagcggatcctatcatggtctggtacgcggaaatcgatgccgcagaagcaatgagtgaatctgctttgaccaccttgattgaggcgaatctacgagtcgggcgacaggaagatgcggcttggagctcgatgcagcttgcggattcagaggggatctggctacagtcgtcatggtacgagagtctccaaagatggccagatgcggtcgaagcgaatcacaaagagggattaaatgatttcgggtcgctggacactttgatcactgcccggcatgcgctcactgaattcccagaggtcttgagaatagcggatgagcattatacaggactgccatacaatcagaaggctcagatcagtcatttgtgcacggtagcggcatgggctgaaggagatttcgacgcgatggggcgatatctttcgtcgcaaccgaaaggcgcgaccaagctactctacaagtgagtttctcaggcaatcgagagagccacggattgatgtttcccttgttctgtagagctattctcgaaacatggcacggcaactatgaagacgcggtcggccatatagcaaaagcccaggccgaagtgtacaatgagctccaagcgcgaacagcttacctagacttttcggctagtaattatgctactgccctccaaactctttcaaaagcacaagtaaggataaatcagttgatatggccgtattgagctgatagtttgacggtcagatgttggtcgagctggaggaagtaatcagatgtgggtgatctcgaagcttgaaatctcgtatcgtggcactgatgagacggctttagacaagcaatctgatcatcatccggagatgcagagagtgttggccaacacctggcaatcacggcaagtaacgcctccagctagagacgttcgtgcgactgaactaacacagttctaagcttcagcctgaaagcatcgcatgtggatattgattccttctataaacgtcttctgttgtggagtctagcggcgaacccttctgaccttcaagatggttggctgtatctcgcaaaattgagtcattcggagggctataaatcgggacgaagaatactcggctccttggcccaagacaatcagcctgtgggtagaccactctggttcagagatcactcaaagaaaaactgattcgatacttcactgccagggcgataaagtcgcatacacgagactgagattcgactgggaggatgcaaaaaaccctctgcagaagatgagggtcgtccaggagctccacaaacatgcgatcactctctcggccttctgtggcatctcggagggaacgatctgtagggtaggaagatgggagttcccccaagccgcattcctgcagtaagaaaaaaacattacaagagtcgacgatggtgttttgctcacgagaaccgatctgatagaggaggtactcgtctccatcgccgcaggttggcgcgatgcatggctcgtttgggggaatggacgcgagaagtccggtcggattggatagaggtgagatgctgctgcaagacggtattgagacgagcgctgaaggttatgtaccatgcatggctcaaggacgataccgtaacagcttatgagtatgtgggggcttctgttctgcttgaaccaaagtggtacgtgtttgtatcgagccagacctcaaaattaggctgaagtgggatgacagggctcgcggcatggagtgtctggcggaaatggccctcgaaattctgcaacacaagcaggcgtcggaatcgagtcaaattgtgaccaactatatggtcgatcggtacatcctaccggcggtctacggtaagcaagtcccgacggaaacgttgttacggaaatgacaagctgacctgagtgaggccttctagccttgttccaatcgatcaaactgcaaagcggtccagagcaaggcgtgaaagcctctttgttggcgctgactttatggtttcgttacggcgcttcgcatcgaagaatattgccggctatcaaatcccatctgaaagagactccaacaagcacctggttacctactatacctcaattgatcgctcggctaggcgctaaggatgttactctgcggtattcgttgatcgactttttgatgcagatcgcggcatcttacgcagacgctctcatatggcctctgttgaccgcctctcaaactcctcgatcggtacatcagagtgctgctttggatattatgcagcaaatgtccgcttcctctcaacacactatgatggtgaaacaatcgcagatggtagggaaggaattgatcatgtctgcgatcagtccggcagaaaggtggaagaacgccattgagaaggttagttgcgtatgtcaaatggtcagggtattttccagctgatgtgaagctcctccttcccaatctattgcagatgctgtacgtcgaagggttaagcgcatcttcatggttgatgttatcggaagagtacgagtcgttgaaggtatggattgtgccataatcgatcaccagatttcaactaaacagtccggataggctcctcaatctgaggaagagtacctcttcatccagcgctttggtgacgcccttgagagtgctaggggagaagttgagaggtatctggcaggcgcaaaatctgccttttataaagcatgcagcgaatatcagaatgtcagtccgcatcaaaaggtttagatctatctccggccaagctgaacggatttccccatgaccttcagatctatcgcaaaatctactctttactggacacatggcgaagaccgaatttccagctcaatctccgactgattgcccctcgcatcgcgagcatgcaagatagcgacctgatagtccccggacacttcgacccgaaaaggcttcgtcacgaacaagagttaattgacaggctcgaaccgatggtagacgtgctgaataccaaacaactacctaggaagctcatcatccacagcaaaaaggccaaatggaccttcctgctcaagggcaacgaagatttgagacaggatgaacgaatcatgcagctgatcacgctcacaaacacgctgctcaaccacaacagtggggcttatacccgtcagctatttgtccagccgtacggcgttacacccttgtccccagactcgggactatgtcaatgggtcggtaataccgagactttgatggctatcgtgacatccggtcgagccaaggtgaaaggtcagcgtctgaccgacagggagtttgcggcgatgtttgcagtacgtatcgcggttgaaccaggacatacgacggtactcatgtcacattgtgcagaccgacctgaaagaattgcaaaaggggggtttcgactatgacaaaggtacggaattcttgggcagtcgcttattacggaaactaacctccgatctccttgcagctacgagccgatacgacgctctatcactcgaccagaaattggagagataccgtagtgccctcgcgatctcgaagcacagtgagtggaccgcacttcgctcggaaaagacggatctgttgatcttgactcgccggtatcgcagccgacttgaaggatatcttatggcgacggagttccagttcacagacctggctatctcgtcgaacctgtttcgcgcgctcaatcgccaccacttcgatggtcggctatgtgatcggtctaggcgatcgccatccgggtaacatcctgatcgagcagaccaagttcaacgcgatcagtatcgactttggagatgtctttgaagcggcggcggaaagatcggcgttccctgagcacgttccatttaggttgacgcccgagattttcaacgcattcgaggcgagtcgcaatcgtttcgtcccatatccccagcagggcgatcggctgatatattggccgacgatagtttgctgctattcacggcgtcaaagctccagggtcccgcggtcactttaaacagtcatcctcgatcaccttgggtgtgctaagagagcacaaggagactctgttggccatgctggaagcgttcgcgcttgacccgttgttgacgtggcaagccaaagaggtcgacaacccgaccggtaagtcgagaacctatgtctttatccagcggcgaattcgctctaacgtgagacttgggcagccgacgatccgtacgacgagaagcgcgaccaagtggtcgccgccgtggtcccctccgatccgcgtctggtcgaccgattggtccattctgaacgtcgcaagaaggacaccgaggtcgtcctcaatctaggcggtagctttatcgccccagggagtctggcccggtccaagcccgtgcatttgcgaggtttgggccgggtcgaagaggaggcgacggcggggggctcgatcgatgtggacatgatggaaggcggcaagaaagggcgtctgggcacggtccacgaatcccagatcagccagccggagatccgacccaagacgaccgccacgacgacaacgacgggcgagggggacgattcgtacatggcgaaaaagctgtcccacatcatgaccaacgaacgggcgttcaaggttctaaaccggatcgaggaaaagctggcgggtacggaccggaacggcgggggatacttcggtggcccgggtgcaaagccggtcgaggttgaagatcaagtccagtacctcatcgaagaagcgaccaagcatgagaatctggcgcaaggtgtgtctgcatgtcggtcctgttgaaatttgagcgggcgttgattcttcgttgttttccaggttacccgctaggttggcttccgacatggtagcagcagtaacgggcagttgaatatcgacgacattggtattattaggtagagatcatttgtcgagtcgcgttacagtactttatacaccgtcaccttgtctctcgtcctttgcaactgcgtggatccgcttacaagatcctaccgttatccatgttgtacctcaacccggtgaccgcagcggtagcgacggcgcccaagcccaacatcttggcccaaccgaatccaccgccacctccaaatccgtcgagcgccttgttggcgagctggtactgacccatggtgatggcggactgacagaagacgaaactgagacccatcgagacgggggaaaggagcgaggcgagggggaatccgatgaccgtggcccacttgacgagatccgaggggggttgacgggtgaagaatcccatggcggtgttttgcaagaagctgcgatgtcggaacatcagctgtggctccatcatccagcccgtgacgtggggactgtgaacgggattctggactcactccatgactccgattccggcaaacgagaccccgacggcgttggccagcttttgctgccacgtgttgggcctaggggcacgccttgcgtatacccagtagagggtcaaggtggtgttgacgatgacgaagaggtcggcgagcttgagcttttcggcgttccctacgattgcaaacaggcgaggcagggaaagagagagcgagagcgagagaggtcagatggtgtttccgtggaagattgcgagaacgaggcgagacttacactatcgattcgcaaacgacaacatcgcacaacgagatgagggaaacgattgaaaccaggacatcacatcagccttccgcctgtcgatcatgcccgctcaaacccgcctgcccactcacaaagaagggccacgtcccgatcatcaagtttcccaacgtaaagtacggcgccaagtccaaggtgatggcttcgaccttgccgcccgaggggtagtaaagttccttgaggtagaggacttcgaggatctgttgaggtccgaaccaggctccgatggcgaaaggactatggaggccgaatgggccgggtgagtcggtgaccggtaacgtatatgccgacaagtgacggggcaagcgactcacgtagggttgaaacaaccggggttcctatcgttcacctgcttcattcccgggttgctgagggcgatggcgtactgctgagagaggaacatgtacgcccacgagatgggagccacgatctttgcggtggagagagagatgcccatagttgcagctgttgaatgtctagtaattcgatatgagttgtatgagcggattggacaggtaagatgggaagatcaaggttacgtgatacggcaggtgacaagctgacaagctagacctgcctatatatatgtgtgtcgatgagcaatagctgacccggctcgctctaatttgacctgacgcggggttcccgtgacgacctcgctcgacgcatcatcatcatcatcgcatcatagcatcatcatcgatcccgatcgccgtccctacctaccgtggacagtcaccacgactccccgccggtatccccatctcctgccccgcgcctgtcgcctggaaccggctgctactggtatcgctcttgatttcgaccgcccgcacgtcgtcatcctcccggccgaggtaggcggttcccaacctttgtcgctgtcgagggccccgagggaagcagcctagatcggcgatcgggggtaacgacccacccaaggggcgacgcgagggtaaacgtcatcatcagtcgacgtaatccacatcacgtgatcacagacgacggaacgcgtgcatcgtcatctccggatctccggcatcgtcacaaagtaaacacaaacgcggacatcactcatcttggctctcgacgacacgtgagccccgacccccatctgttatcgatgtccgttcccgtcttccgtctcgctcgctcgcttccggttaccggttatctcgttcacaagtcgatgaacgcatgaaatgaccctcagctccttgcagcgagactttgtcactttcacaacggtcagcactaaaagtttgaccgcgtacatacagcaatagcttgcatcaaggaacatcatatatacaagtcccacaagtacctggggcaatctctccatcttggtcccaatcaacacacccgtcatcgccatccaacactataatatggacgccgaactcgttcgggttgaccccccacacaccttcccagccttgacctcgtcctctgcaaccgcacctcgtccctcattatcatcctcgtccaaacgcaacaatgcggattccctccccacgcaaccagagacggctttcccgctagccatgccctcgaacccttccccggacggagaagcgcaggaccaacccgcactctccatcctccactctctagacctggaagagatcgacccgacgacgttccgctcggtcagcctgtggacgcctgctggtgcgagaggagcgttcggagggcaggtgatcgggcaggcgttgaacgcggcgacgaggacggtggatatcgccggaaaggacaaggcgggcaaagtctgggggttacacagccagcacgtaggttccgagaaacggtcccttccacgcttgaaccggacgatatagctgatcgtgtgtcctcctttgtcgttgttgacggtatgtgctacgcagtgctacttcttgctcccgtgagtcgacttggccctcaacgccgggttttctcgagctgatctgtgaaatttgttcaacgcagtgtcgtatcaacggaacctattatctatcgtgtggagaaactcagggacggtaagtcgatagcagaccgtaccgagacgcggtgggaggagactgatcggtagaattcggatgcgagacaggtcggtcttatgtcactaggtgagttgtcgtcgaccggtcaccgacgcaccctcagatgccaaacgagctgacgatctcgatcattcctcttactgccctgccttggtagacaagtgacggccacccaacgtggaatccccgtcttcatcctctcctgctcattcaccgtccctccccccatttcggcgccccagccttcgttcagcgtgcccatgccactgaacgtgcccggaccagaggaatgtgaggccgaggaagacaagtgggagcgtgtcttgaaagaacggaaagacgctggcagagaggtcgatggggatgccaagcgcgggttgatggcgtatatcagggtgagcattcaggtcgtgactccggtgattaccctcgttcaccctttgtcttgtactgactcgtcatgcacttgttggtacaggaacggaaagaatcgccgatcgccctcaaggagatccctaggtcggcacggatgaaattccctacgatagccggagaagatgtcaaagagtcggacgagcggtcgatgcaggtgcacgagaggatgctgtggatgaggacacgggacgagactgtcggtggcgaggagagcaatatgcaaaaggtgagtagcgagaccgatcagaccacgagcagcgacgagcgtagtggctcatgatcgggaatcggggcattcggcggacagtgcatcttggcgtacatctccgactttcaattcgtaggctccgcagcgcagagtgttgggttgtcgcatacgacttcgccacgtctcggtatgctggtgagtttcacatactcgcgctcgtgcacgccttcgcaagtgctgaagtcgacccctcccggcccgctctcaggcctcgctggaccacgtcgtctactggtactcgacgaccttcaagacgtccgactggttgctccacgtcatctcggccccgaggacgggtgatggtcgaggtgtcgtcgaaggcaagttttacaccgccgagggcgagttgatcgcggttaccgtgcaagaaggcgtcgttcgtgccgctccggcacagaacaaagcaaagttgtagtcgatcgtcttgagtgaaacttgcctgtagggctagcggttgtatataggataagcgaattcaggacgatccttggtgatctgcagagcagctccaggtattgtttgtttgtccaagaatgtccagagatgtccagagatgtccagggatgagcgcctgcggaagcaaatatggccaggagacaaagacaggaaggtccaatcatgctgagcttgtcctcccttgatctacatacctacctgtcctgaaaatgaacacacatatagctgatgcagcagataggtctacataccatcagggcacctctcactactgttctacatcgcagtgatccgtgtggactgacgaccaagcctcggcaccgggtgactccgaaatttcggcatccccctttctcctggactttaatctctctggaccagctaccatcaccacctagaaatcatcccaatcacccctaaaacttggagaagcgttccgaatcggcgatgtcgcagatgatgctgcgcccgccggctacgccagtgaaagcggaagattatgatagctacgacgaattgttgacggaaggagaggatgaagaacaggaaccggctacccagccggtaggatctaccgcgccgacgttgattcagggattcctcaagccgtatagaacctcccagtactcggccagctctttgaaccgtaagcactaggcatttggtattgctcatgagattcccgagctgacggtgaccgggctgcgaccttttagtgatggtgaaccatggggacgtgaacctggaagtcgaatatcagcgagacgtggtctggacgggtgagtctgattcatcacagtgacttcaggattctgatagcaaggaccttgccacgggacagaatcccggcaggaaggcttgatcgattcgttgtttctcaactactttgttccgccggttctcgtaagttctgctcgaatcttgcttgacgatgataggcaggatctgaccaactctgctcgtttcctcaaaagttctcgacacgaacgcaggatgatgggacccagaagagacagtgcagtaagcggatcatggacgcaaagattcagtaagcagtctgactgatcttgatgtatcgttgtcgtgtctgtcagtggacggaaagcagaggttgacatcgatttgcaagtttatgagtggccaagtgagtgcaatcgttgcaaactttattaataccgggcattcagtagctaacttgccctcgcacattgcagatttcttgtgagcatatgagtatagagttgcctcagagctagagatgaaactcagacgtatcgtcacggcaatccacgttcgtagggaggccgacgtgagtaactagccacttgactgccgctttaacgcatcctaatcaaatttcatactatgaaaaagatctggatacgggaaggggaagcggtactggtacacgtttgatccagccattcaccgaggtctagaactgcctcccagagaaaaggcgatttttgcaaacaagcagatccaatgtggtgggtttgatgcttcagatacgtaaaaaggtcgaggctttcggagactgacgactaatttccatcgcagccgaattcgatgatttgacagacgaacaagagagggaaatcttccgtgagtgctagccggaacatggggttagcttcagctcgctcacccttacttttgttttttgctacgggacagagcgcgtccaactcggtgtcgccctctctcccgccgaaaaacttcaggccctcgctacgccctactctacgtgggtcactgtccttctgaacaagcacgtctttggcacggaaggcatcaacagctactaccgggactggaagcaagaccgtggacaggcgtatcagaatgtctgtatcatgatatacttcattgagaaacaccctcagcaaatcacttcggtttcttctactgttctcacaacgtggctcaagcgcctagatccgccggaatcgcacttgcgccgcaagattgacaagatcttccatttctacattgagcttgtcgcacgataccaagacatcgcgattacggcccgcggaaagaaactgtccccgatcggtgcgtgtagccgatgcttcgtgtcggtagctagagctgactcgtgcaaatgaacgacagagttcgcgttcatcggtgtagtgatttatgtccttggaccacgtatgagccttgaggaaatagccggcaggattggtgagatgagagactatgtcagaggattcgacatcaatgttcggtccaacacatccaccatcagtactcttgtgagcatctatcgagcatcactactgacccgctgcaacgtattgaccaccgagatctttcgatgtacgcgacagtggtcatggctcaatcagcagcggaagaaggtagacccaaactctcgacctctctgggtagaagaggtccccgaaacgggatcgtcgaggaaacgcgctcgtcccgatcacgacgacgactacgtgggaggcggtatccgctctgacggccccagcgaccgtcggaacactcgtttccagggatagacagagatgtctacctatcacgagcatctttacgatatgaacatctctagtgtagccggcatgtattgtgtagtcgtcacctgtattatgggcgggcagtgacgccccgtgtttgatcatacgcatcgtacaaagatatgacgtgtctggcgggaagggcttcgaatagcttgtacgctagcttcaaggcttgatcctgggtacttcttcaggagtcccccctacgattctcgatacaggttacatatagttttgcagggtaaagttgaacctcaactggctcaaactagttgtcagtccggtaatcgcaacgacctgaagcttggagaggtcctttgttgtcgattcgattagtcgggataatcgttcggcaacctcggtcaccatctggacgcgtgctttcgagcagaagtccatacgtctgcatggggagaggggttgcaagaggatacaaagcgctacaatagccggcccaataacgagatgccagctcctaagagctcgaggaggagagcggtcctggaacggtcggcaacctcgaccgttatcaagagtgctccgaaagcggttccgaggccgacataccctacattcctgtcctctcggtcgacaagaagaacatcctgggccaaagatgactcgggtgatgtgctcgggctagaaacagctactttgctgtccaaagagcggaacgtgaacgctctttcggctgggctgattgaagccccaagactgacaagaaaggcgacctactcttcgcttcccccttcgcccaccggagcgatccgattagacgacgacggtctacgggatatttcggagcaatcgcatttggattttgctagcttgacgcttggcatcgatcctcactccgacgacatcctcgcccaagctatacagcgaatcgcttcgaggagaggttcagcaatctcgctggaactcgccgacgatagatttcgtgccacatcattgccaccggaagagttcttctcgtctggaccccctgtgtcaagcagccttcagtctctaccgaatctcaggcaagagacatccattgacgacgaagacgaggacgaagacacgcggagcatcaaggccgccgaagtcgagctcagctctccccaatcagcaggatccatatcagagacagagcgtctcgatgatgacgtctttgaagatgcattcgtttcgcacgatagctcgcccacagatgattctctgttgctaggtggcacgtcgggcaatacatgcccatatggagacagggaagaaggaaggagactctcatggtgggacgttctgcgcgaggctgtggtcgaagaggaggagcatgcgttggaaatacaaggaaaatggcgagtcatcccgtagtcgatagaatgataccgccgagagctgaccaagaatactgtaacacagggatcgcatcgccaattttctagccgtacctgctgccatcgaaagggtaggtcatcatacgtttcacttgttgttccagtcgctgatagcttgcttcccagattacgcttcttggtgctctgttatgcctggacagtttcctatactatttcactattttgcctgtcagaacactgctggcaattatgtctttcgtgtggcagtcgttgcatggacgatgtctgaagtgagtgtctgaagcagaacaagtcagtctcaacattgctgagccgattctataagcagatcccctggtgtctcacacatgcagtccattctcaagatggggcttctgatcgtaccgactattgtgttacttaagacgaccgatgctagcaagatgtatcatggcgtccgagggcaagacacaatcaagctctacgtgatcttcaacgcattagaggtaaattcagcgtgacgttgacagaatataaggactatgcatattcacaagaatactccaccttcacagatagccgacaagctttgcagtgcgttcggtcaggacattctggataccctcttcgcggccgagacactcggggccaggtcgagcaacaattcgatccggctgaaaggccagcgggaaagccgagcagagcgagcgcagcgtagaagagagcgcgccagaccatttttcttcttcctgctcgctttggcgtatgtccgtgagtacgatgctctgtccctgctatgccttcttcactaacgtccaaatactcagatgtacatgcactggtatacttctaccagcttgtctcgctcaacgtagcggtcaactcctacgacaacgccctgttgaccctactcgtcagtaaccaattcgttgagatcaagggctgtaagcgctggtatgatacgtggtgagctggacttggctgatgtctcgatcttttctacgaagctgttttcaagaaatttgagaaggagaacttgttccagatcatgtgtgcgggtgagcaagatcgggtctcttgtaagcggagttcttcagagctgatttcactgcattcagacattgtggagcgattttctttgactctgatgctgtcattgatcgccggacgaaaccttatcgagatcattggctccgatgtagatttcgacccaagaagtctgctaagaggtaaaggactccttcagacaatcatgtcggtgagttagaacgggtaatacacctgagggttcttcactcactactgtacggatgtcgttagcctgtccttgcagtcatactttcagaaatggttgtcgattggctcaagcatggcttcataaccaagttcaaccacgtaaagacgaccatatacgagaggtatacggatgtgttatgcaaggacatactattagccgcgccgacatcgagaggcggacgcggctcaaaggtgtgtgaccggccatacgtgggcaagcctgcacgtaaaactgatggcaatcacacttgtttgcagcgacgcactcttctcactgacagatctaccctagtcacccgtcgtctaggatttgctgcgttgccactggcctgcttgatgattcgcatctccgctcaggctttcggaatggtgtggtctaacgcaatacccgccgtgacagaggattctagccgttcagccttggcaaatacatttgagaaatggtggaggcctgtatcgacgactttggtgtttgccatcggatggttctggtaagttgacggtacctttgtcgacctattcgaaagtagactgtggcctgaatccgtgctgggtatagtcttctagccctcaagagcattatggggctcaacctgcttgctttcgctcatggtcgtcaagctggtatggaacatcgcgagcaggaagatcggatcaacgactttggacgcaagcccatcggcgacagcctgcaggaacaagtaggccaggtcaaatcacgtcaacagatggcatgtactgaccgagtccggttctcacactgccagaaatataacgagcaggtcagagaccacttgtcccgcaaacaggatgacatgccaaagctcgagactcacaagaaggaggacgatgggaaaggtgggggaaagcccaagtggaaattggaagaggttgaacgatggtccatgatcaaacgaatcttttgagatgaaagcatgtatgtcatcgactttgaacttggcactcgcggtcaggcaggttcttggctcgttgcctcattacaacgcataggtcgaagcatgcggaggttcagcgggccgaacttcgggcttggctgcccgaacaagacgaccatcgttcgtttcaccaacaagttgcacagtcatctgcgatcgacgatcgaagccgaagagccttcggtgatggaaagaaagaagccccgcctaaaccttgttttccctgtcacacagtctcgccgaggcacagtagagtgcgatatggttcgggtctacgcagccggcccgattctcacgggtagaccggcgtttccagagggggagaagggaaaggggttgacacgcgcgcggtctttgccgatcaaatccatctggcccggatcgaggtcctttgtactctcgcatcgatcgaaggggttgtcttttgatgagattatactcttttcctacttgcccagagtttcgaaagggccaagggcgctttgtagagccatcgtgcttggtcaacgacagattcttcccctatcatgcctatcatttcgtcgcgtcgcttgtttacattcgatgtgaacaagcgaagcggacgatgaaacgcggggtgagcgggaacaacaaagaggactgatggctgattagcttcgtgtctcatcaatcacttccccttgtagccttccgctcccgcgaccgcgtcgtcatcatcagtccgtaccgatgcttggttcatctccagcttcatcatcctcgtcatcccctgtaccccttcgtgctgtgcgctcactcagccttgtcgcccttcaaacatgtgggccggtcaggcataaaaggctacgcgagcgcgatctgatcgttacagtcgagattgatcgcttatgggggtcttctcgaaaagaagccatttcctcttgtcgactccttttcacgatcacatataggggggctaagcctctgacaaaggaaagaacccggaaaaacagcaagcaaaagggcgaaatcgagttttcccttacttctgcctcacgcgagcccgaatccatcgcaactttgacccttgttctgagcatcaacgacgaccctcggcaagtctcgatcgatcacgcggatatccagaccctgcaaatcttttcgctctgtatatccacctcgacttcactcttcttccttgtgcacgcatcgaacggacgcggatcacttgtcctggtttcacacgattgggccacgagcacgcgagacccctagtagagacaaggatcgacggattcgagaacgaatcgtcatccgcaggtcgccgacgttgcagaccacgagggacagcattgtgagagactgcactgcctcctgtctttgttcaaagggctttgtgaccgctgacgccttcctcatactctctctcttcgctccggtcgatcatcttatgcccgcctatcctctggaaccgattactcattcactcgggccccctatcaattcttcaccgcatagctttgcagagctttgcagatccactccttgcagcgaaacggacttgccacccgtgatcatccactcatccaacacaacaagagtcacacccggcccgatttaaaggcaggctgaccaggctttgaaggacattcagctcaacactgcctcagatataaagggcttactctatctaggacaacggagacggccaatctattcaacatgtctggacgtacaaatactcttgccccctcgactactcgacgtcgagaccctttgtctggcacttcatcgtcaagttgggctccgatcacgccaatcgtccatcctgaaccacgtcgattgtcatcccctagtaccacaaaccgggcaggtcgacctctaccccgacctcgaactagtcctcacatatctaccactagccccgtcgccaaccccggacgcgaactgaatcagcctgacgatcgtccaagatcagcccattcgagagcggatcgcaatctcccacgaagtcttgagcacgccaggctcatcgaactaccatcgagttctatcgtcacctacgtcgaggagcctcatcgcccatctcgaacaccatcgcggtcttcggtgccagatactggtccctatctccttcgacgctcgcctcgtatctacttcgaagacgtgctcccggccccgcctcgtcgaaccagcaatctttcctccagaaacactatcatgatctctttcgcccctgtgcctcaacacggcatgacgcctcgaacttcgccacttccaagtcacaccggcatgtcaaatgacagcatgcttgtcgatgaggtcatgcacaccccaacccccttcaaaggccctttactcgcttccgtaaaggtagtcctggatgacgggtcgaactgccttgagacgatcggaggagcccggaccgggtgagtttaccgtgtttcagagtcctagctggaatcatagctgaaattgcttttccgcgatagaaccgcgtattccttagctgggcacgtcgtattgactgtgccgaatctaccgctagcaggaggatgccccgatcccgcttggaggaccaggacgcgagagctcaagcgcttgagagtctcgttcgaagggaagagcgaatatcacgacgacactggtaagtcctgaatctcgagtccgctgtggcaacatctggcttatacaagaatgtttcactaaatctcaggcagatatcaggccctccaactttgccgagttgacaaggatctgatacccgagcatgggcagtctcaactgctacacaacgccccgaccaactcttcgtcttcgatctaccataattcgatatcatacgcgctggctttcgatgtgaccgttcctggctggctgcctgcatccttctccaacgagctgacaagcacttcctacggtctggtttgcgaagcggagattggctgggcatctgcaacgaacgagggtctgtgcatcaacgtgcctagcgactgtatgaaccagtcaacggcgtcatctatgccgatcccgatcggaagtggcttcggcgccgcatcccgcttcctaccccgccttgctaaatcggtggcgaccgctttcactggattccctgcagctcaatgggaacccgagcatactcgaaccctcagatccgagttcaagactattaaagtcgtccgacaccgggccccctctactacttccctctctctcgacgagcgcggcaacacgatcgggcaaatcgtcaaccagtccgaaccagcacagcgtcactttacgttgaaaccctcggaggatagccctagtcctatcgagtgtatggtcagcacacccgagatcgtcgatctggacggccccagtctccgcgtaagcgtccgtcttcgagctcgaaaaatggcaacatcgggtccctcgactttaccaatatccgagccgtctcgagcggtaccagctggtttcatgacatcgacagacgagaatggagatgtatcgatggagaaccttagtggaagcggggcagttgctcccgattccggctccaccatacacccacaatcgaagggtcgcatcccaagctcgatcatggtcgaagagagggtaaaaatggtcgagattgggatggaagtcgaggaaatcgagcgttacaggtgagaatccgtgatcctgcccgacgagaacaaccacactgatcgtattttaaaaaccagctctgctccagcacagacgttcgcttccgctttcccgatcccagatcgacagccgcagctttccgctagctctgctcctttcgatgttggaaacaccgcctttctgtctccaccttcccactcagcccgcatccacttgctcggtctcgcaccaacgaccattgccaaggcaaatcgcagccgtactctgctgcttggggaagacggaagacctcgtacgtatcgctttgagggagacggtcttgatctcggcaacggatggcgcaaggtcaacatcgtcgtacctctgccacgacgctcgaccgacggatcgaattatcacgctcccagttccgaaactgagacaccgtatctgaaactcaagcataagctcaaggtgagctgacttcgtattctagatactgaggactgagctgattatacgcgttctgagttccaacagatcaaactgatctgcaggacggcgtctgctgtaggagctgagaccgtcgtctgcttgacaactccactccgcatgagcacatccgccacgaccgtcaggagaacgccatgcacgactcctaacctcagcaaacccatcatccctcttccagcatacaatcagattttccacgagaatggcgcgatccgtgaggatgacgacccattgccgttatacgaggagccctcgacgttgataccggagccatcttcacctccttctgccgccacaaacgaggtagaatcaacggaagatgcaatggagcttgccgaccaggagcaagtccttcaggccattaccccggattatcgctccctaagccccatccagccgcctgatatatcgcgagtcagccaatacgcgctgcctcaatcggccgactggtcatcaacggtcccctctcttgtttcttcatccggctatctctactctccaagctcgactttcgcttctgtccccggaccacgcactcctcatacgccacggagctcgtcgccatcgtctttcgacgagatgaatggactcgctttcggtgccggaactccggagggtctagacgagacttatgctactccaggaccgttgacagaacacttccaacaccagcaaccgtttcacgatgctgtgactaggtatcaaatgctcgctcgtaccaagggcgcaaggaatatctcgggcctctcacagctcgccgaaccacaggagatgagctagatatatcgctccggcaccgttatagtgataggtgcaccatatggtagtatactaggtcatagaacctgaactagagacgaaatatcaaggcctgtaacctgactgtagcatcatcatcttgcaaacatggcatatgaaactttgcttgatcgcttaagttgaaatgatcatcgttctccggttgaaacgcgttccccccgatccttttcggttcgcgtcgagtctacgcttcagtcgggatcggatagctggcctaagcagtgttgctgatagctgagcatcggtatgatctcaagagagctgctatgtggaccatgtatctcctgtccttctcatgataggccccgtctcgacgactacgaccgtgatccgtcttgctgaatcgactatagtccgccggccactcgggcctgcaggccatggccagagaacccacttcggtttcccctttatttgagcagagaatgcgcatcaacccgaacttcactgcatccccaacgcccaacagcagaccaataacaccgaacaacacgagcaaatctacttcagcaggacatactcataccccggatcgacagaactctttggaagcgcagtcgtccgcgtcgtccgtcaccccggcgaattctgcggtactgacattgaaccccaactcgatggctatggtcgcaaacggggtcacgaaacccgccaaaaacggtacgttactatagtcctgctggacaggtcagtcagtgtgtttgacttctagatgctcatgcttgcacggcttcgcggcacgtagaaaagttgtgccggaatgttctgatatacgggtgggctgtctcgcttagcttggccgattgaagtgttagtagctaacgaaccgattctcggaaagatcctgccgcttcgaagacaagggtgtgagtacctgcttcgagaagtgttcaggtatctggatcccactcatactgacgccatatcgacagtgcatctactctcacggaaacgtccctggaccttcatcctcttccaagggctcacaaagtcctacaggcacgtcgagttcctctggagggtcagtagcacgggaatcggttcactcagaaacgcatgctcacgtttgtgcttggtagccgctctcgaggaccgctcgcaagctcagcatttgggacttccgctaccgctcagccattcaacccaaaccccgcgtcccgccctcttcccgtgtcgatgagctcggccggatcactcaacgatataccacccatgacctcaccatcgcgcatgtcggcttccgtatctgctccgatcttcaagcctgcaggtaatccagcgcccagcaccgcaccctcgaccccgagcaagatgaacgctgtgggaagcagcataagcaccgagcatctgaaggccgcgacgtttgtgcctcgtaccgggggttccatgacacccagcgccacgcagagctcgatctaccagccgacagaagaagactcggtctcgaccgcccgaggcgatgtcggaggatacgtctcgggagcgatgatgaatatgaacggggctgttcctgggggtaccagctcgcaaggggtgagatttgaaacagagtggcgattggtctaccgacaatgctgagacggatgtccgtctgctttcgagctatacagatgaatatggaacagaaggaaaactattatcctacggacactcgagtcgtgagtgcatgccgtcaacatctgcacagcaagcgttacctcagacgttgactttgtactgtggtgaccacagctcgatcatcacctttacacaacgcctcttccccataccgccaatcttcccgcgtcacacctacctttgcacaatttcttcctccctgccgacttgttggcatttatccacggtcgggcagaagccaaattggcgacccgatcagcagacgggtctttgccttccgagctgcacgtataccactcgcttcacaccctcatggcagaggcaactcctcaggaaaggagcatgcgggtatttggctacattaccgacgcctaccgagcccgctgtcgactagatggcaggctgtactgcttgcgacgtgtggaaggtaggatgttccggtataagcagcgagtcttggcagctcctgactaaagcaatcaatctgacaggattcaaattagggaaggagacggctttcagcgtcttggacaaatggcgtcgtatccggcatcctaacatcgtctcggtcagggaagctttcacgacgagattgttcaacgatagttgtacgtatactgtgcattaagtgtctctcgcatcttcactgactacagatacaatccagctgttatcttcgcatacgactaccatccccggtcaagaaccctctacgaggctcaccttggaaaccagatcgagatgataacgcaagccaacggaacgatcacgcccgctcccaaagctccgaccggcattcccgagcgagttctatggagctatattgcgcaaatcgccaacggcctcaaggccatacataccgctggtctcgcgtgtcgaaccatcgagccgaccaagatcatcctcacaggtcggaaccggtaagaacatcatcagctcaacctgctgtatacgaacgatggctcattcgcattcaaatgcagtattcgattgaactgctgctccatcttcgacgtcacgacttacgattcaccgtcagccaacttgcattatcagcaacaagacgatcttctcaactttggtaaactccttgtgtcattgtgttgcggcacgactggtgctgtgcacgccttggccgcctcgctcgaagcgatccagacctcttactcgccagatgtcaagctcgtcatcctctacctgctcggaaagcctggaccaggcaagagcatcgacgatattttggtcatgctaggaccccgcctattgaacgagttcgatgccatgcaaaagtgagtcgatccgaaaatgtatcgtcgaagcccacttactcacacgtctgttcattgcgctacgaacagctatgcagacagcctcgagtctggactcgaagctgaggtcgagaacggacgggtggccaggatgctcatcaagctcggctttataaacgagcgacccgagtatgtgccgagtctgctcatgagcagcttccctggtgtttgaccctattacatcacagatttcagcaggatccaagatggtcggaaactggggaccggtgagccttgactccatctttaccagccgtttcattgactgactgcgcggtgcgacatcagctacgtcctcaagcttttccgtgattatgtcttccactcagttgacgaggtcggcaaccctgtgttggatctgactcatgtgctcctggcgctgaacaaggtcagtatcgggaacagcttgacacctttgagccgggtaattgactgcggacgttgccatgatcgcagacggatgccagcctagatgaaaagatcatgttggtagcgcgtgacgaacagagctgtctcgtcgtgtcgtacagagagattcgcaattccatagaaaaggcctacatgtgagttgggcgtcggagtgtcctcgaatgtgtccggaatcggaagctgatcgtggaacgatgggtgttttcggtaccttttcttccagggagctgatgcagcagtcttccgggatgcgatgagcggtgtgatgtgtcctctgagaggtgggatggaggaattttcatttgtatcttggcgacagtgacatgcaaggaaagatgaagaaatgtagcttgaaatcgagccaacgattcgatgcgattcggcttcgagactggcgcgtgggtttccttgttctctctctcgctgagtcgcgttcggttccttattcttagtttcgcgcaaaagatagtctggtgaggtggtgaggtggatgggtaggcaaggtacaattcacgacgagtaatattgaaatcgacgattcactgatcactgtagataggatcagccataatcgcaagacgacatatcatcttagcagaggatcattagttctaagagcctcggagcgctgaaagctacgcactcgaaagcggccctctttaggcggtgtcgtctggttatcatagtctggtgagccaggtccgcctgtgatcatcggtagttccgacctgtgatctgatcatgcttcggctccatggtgcctcgacaatgaacagatcagctctattgcagtttactgcctatctttcaccaaaatggcgatcatcatcacgccggggcagcaacgactgggtattcgagtcgcccttggattcctcctcatcatcgtcttccgctccatcctcttcccctcgaatcagccgaccaaagagatccagtcacacggggtacttgaacgagtcctcttgaccgacaagtatctggacgtccacaagtaccccttcttgcaacaccgtaccggtcgggatgatcgaccagacctgttcgacaaggaggtcaacgacggggtgatggacttttggacccggttccagaagcccttcatcacgggaagtgagacggcccatctcgaccaacaggtcgtccgtggagctatcgaggacctcttgatgttcaacggttgggtagcgggagcttgtcccacgttgaagcgaccgttcgggcaaaactcgatggacgaacactttgaagatctcgccaacaagggtcacctctactacgtcggaatcgtcgtccactctgccgatcatttcctcgtcgatcagctcgccgtcatcgttcaactcgctcgacgactcgggacacgcaacatctttgtctcgatcctggattcagcttcgacggattcgacggcgaccctctctgacctctgcgaggccgtcatgatcaccttgggtatcgcgttccgtatcaagcgtgtcccacctatgacgcacgagccttcggccgcttactaccctctcgaagaggctgaggcgaggaactacgcacttgaacctctacatgagctgtggcagaagaggagcgtcaagttccacaaggtcatctggctgaaggggttcacctgccctaacgatgtgctcgagagcttgcgagtcagcgaggtcaacaacgccgccatggtctgcggtatggactgggctgagcacaacgggttctttattttctctgatcggtaagtctcgtgtggcagcctgcatcacaggtacggcagatctgactcgcctcgtgtgcacagatggagaactagggacatcgagggcaacttgttccgacaggctaagtccaactcgaagcccgaggctggaccccctcgtgacaggaccggtaccgaacgatacgccaaccatctgcccttccaagtcttttgctgcgagtccggtagtcacgtcgtggatcccgaacagtcctattaccgaggtatcgactaccgagcctccgagatggcacaaaatttatctagcaccgagttgccccccgattgggaccccgagtaccagtgcatggattcgacgcagatgtggttctgccgcgacttgtggaccgacgccgccaaggatggtctcaaaggcggcaagggcggtctgagtggcaagatgcctgtgggacacaaccgaaaggtcggccacaagaagcgagacattgctcctcctgtcgaggctgtcgagcctactcctgaggtcgccgacgccgttcccgaactcaaagcacctgaacgtgatgagagagccgagaagcaggcgctcgagtatgccaagcgtcaggccatcaaggacgacaaggagcaggattccggaaccgacaacgatgccatggcggagagtgaggagaatgcggctccgcctcccattcaggcgcaagatcagcttcccgcttctgcgtacttgatccccaacgctgctttcaccccggcgaggatcttggtcaacccgcgatgcatcaccacctacggaggtgtctcgcatacccaattggcgctcgatttgttcggaaccaagggtcacgaggattccggtggcaagtacgcattggaggattggatgggtcctcctgacagtttcgtctgtcaagagatgcgcactactggaggacgaacagcgcccaagagtcagcgacgtgtgggttggttgttgcagaacgaggtgagctagttctgtcacaatgcctacgcgaattacactaacaagaaatgctctctttcccaattgttcaatatccaggttggaatttgaatggaaggcttggaaagggagactcggagctctttgacgagggactttgatcgtcaagggacacctttgtacatttagagacgcagaccatggtcattgcatcagtacgaggtcgttcgccggtgtgaaggagtattgatggttgtgtgccggggaggcgatgacgattcgggagatgccggcaacgcgacgcacgcgagtcggtcgatcgatcgagcggctcgtcgtccgataattcatggtacatggtgaaatgtcgccttcaaatgcgttatctcaaccaattcgtcaacatcgtttcattccaatctacatctgaagctagctagaaaacctcagaggaccattggaatgtttcgaagcgccagcgcttcgccgttgcgagtcgctcgaagatggcagtcgactaccgccaacgtagagacacaagccgtcagacgaacgaaaccgtcgagattgtataggacagggcgattctttctcgtcaccggtggagttggagtagctgcatggcaagcggacgaaaggttcaatgccgctgccgtgactaggagcgctcgcgctttggcgatggggtgagttccatactgtgatcgccctgtgcttttgcttagcttatgctgttcaatctctgtattccaggttgctatgcaccatcgattgtaagtgaacgatgacgatcgaatattgcatgctttatactgacattccgcgagggctgaccgctccagacaaatggaatttcaaccctgaaaacgctgccgacatcgagcatatgcatgaacgagtcgcccgccgcttccacgagactatcgtcaccaaccaaggactctggatcaaagctggccaggctcttggattgcaagccgctctcctacccaaaccttataggacggcattttcagacatcttcgacgacgccccgaccgtaccttatgcagagatcgagaacgtgatcaagcaggatctgggaggaaagttgccagaagaaatctttaccactttcgaacacaaggcagtcaactctgccagtattgctcaggtacatcgagctactgtacggagagccgagatcggaccggatggaaagcctactggaaagacctggatggaggatgtggcagtcaaggttggtctcaagatggccacctgatgcacccattctgcggacctatactgagaatcgattgctcaataaacagatccagaagccggccatccgcaagcaagtcgagtgggatttgtggtgttaccgtttcttgagcggactggccgagaagctgtttgacatgccaagtgggttctctttatgcgtcgtgcacttcgagggttgagagctgatgacaggctcaaactttacagtggccttcgtgtgagctatcgcgacccggtctttttgtgatcctagctcactgttatccatatctagtgcggattacgtctctgaacagatgcgtctcgagaccaatttcttgcacgaagcccacaatgctcaaaagtgtgcaaagttcctcgccgacacgcccgagttgcgagacaaggtctacgtgcctaaagtctaccccgagatcgccgggacagaacgggtcatggtgatggagtacgtcaagggttgcaagatcaccgacaaggagaagatcgaggccatgggattcacttcaaaggaggtcatggataccatgatcgctacgatggtcagtaccgtgggcttcgtctaaatcgtcgagagcgcgagctcatggggatcgaacacgacgacagagtgcgatgactttcaagtggggtttcgtgcattgtgaccctcatcctggaaacatcttggtacgaccccacccgtccgaccccaaaaagcctcaggtcgtgagtttaaagaagctggagatatcgactaggactgtcttgaccttgacttgtttatcttcaggtcctcctcgatcacggattgtgtgagtgtttgaccgtgcatatcctagaaacacgccatctgacagtctcaatctggatagaccaagacctgcctgacaagttccgtcgcgaatatacttcactttggaagagtctgttcaccgtcgacactgccgaaatccagcggatagctggagaatggttcgtcttcgtcctaaccgagcctcgaacccggctgaccttgcccgccttgcaggggtattaacttggacgtcaatctgttcgcctcggccatcacccttcgaccgttccaagtggagaagaaccagagctcgcttgaagctcaaaaggatgtcaagtccaagaccgactatgagctccaggtcgagctcaaggagaggatcaggaacatgttggaaaatgagcagaagattccgcgcgaattgatctttgtgggtagggcccaaaggatcactcagtcgttgaaccaggtgagaagagtctcgaggatcatccgagacatgacgaattgctgagggatttttcgcttcgaagattgtcggatcgccttcaccgcgactgaacatttcagcccacgttagtttataagacaattctgcagaaatgtcccccacgattgaccaccttcgtctcgatcttagtgggctcgcaaggggtggagagaaaacttgtctccgggcgagcggacgctctgggctagaggaccaaagggatggttgcaggaccgatcagatagcgtcatctacgggttcgctctattggctctcgacctgagtttctggtcgagcagggtcaggcaatgtgagtcacttcgttagcgtggaattattcaagggcgatgcatcagctgaccggaagaacgatctcagggtggtaccgaggttcagaaaagggcaagcagggatgggaggatgatctgaacaagaagtttgcgggtatcgcggaatcttacgggatcgcgtgggacgaggatccattcttgggttgataggctcgttccggagcgacgaggaataaatccgatcataatacatgcacaattgactctttgatgtatcataaccttacttttcacttagctttgcgacttcgaccattcgtatcgaattgtatcaatcgtccatcattctgtggtccatcaccctcgcccccagcttgtttccgtcaaaagcgcgacgcctcgacttgccgcatcgggtaagcgcgaacggtaagacgagagcgaagcagaggccgttcgttcgtgctctctcgacgtcgtcgtcggccccggacgatcgacggtggggtcaagaagggaatgtggtcagaacattaccattgagcatgtcgcctagcactcgctccgcctcaacttacctctcaatctttatcaccaagagaaacagctctagccgttacaaagcttcatccgcacctctctccccgcctctcctcgacacttttccatcctcaacctcttcactccacctcacctcatccaccgcctctcctcctttacccacttcgccgaagcacgcaacccaatcttcacagcccccgtcttcaactccgtagcgcctctcctgtcgatctcttcataggaacctaccctcgtgcaaaccagaacgaattacgaagaacaatgtctgccactgaaactaacggtgagtcacgtcatgcgggtcctgcttagaaggctacaggagcctcagggaattccggctcagcctttcaaaggaggtcttggtcgctctagcggcagagacctctggagagcagttcatatgcgcgttctttgatgacaggagctgaccgagatttcctcgctattgccattccgtcacatgccatgcaactcgcatgaccacccttgacctctatcgattatccatcttccctgcttgcatcccatttcggcgtcctcaaagaaggacaaatgcccgcccctacttcccccgagcagggcaacaacgtcgaccagaccaacgacctcaccgagttccctggcgaggacggatcgggtgccatctcgatccgtgcgcttatcagcaccaaggaagccggtatcatcatcggacaacaaggaaagactgtcgccgggatcaggaacgagaacgaggtcaaggctggtgtcagcaaggtcgtccagggtgtacaggaccgtgttttgagcatcaccggtcaggtcgagaatgtctccaaggtgggtcgaaaaagccagagccatggactctagctagtagctgcaatcgtgctgacttcacgacgttgacgaatttcaggcctttgcccaagtcgccaagaccctcttggaaacccctcttgccgaccccgaacacctccccagcaacgccttcacctcgatgcgtctgctgatctcgcacaacctcatgggatccatcatcggaaagtccggcgctaccatcaagcagatccaagacgcctcgggtgcccgaatggtcgcttccaaggagatgttgccccaatcgaccgagcgagttgtcgagatccagggcaacgtcgaggccatcaagcaggccgtccaccagatcggagagtgcttgttgcgtgactgggacagggctcaggggaccatctactaccagcccggtgctgccggtgatcagggcgttctcgctggaggtctcggtgctgctaccgtcaccggacctactggtggaatcaggcgggccagtgccactcccacatttggaggtggagagaggaggatgagccgagccgctcctcagctcggaggtgacaggaggaggtccgagggtggaggtctgcctcctgcctcgttgccccccgctggccaagcctcgttcggcggcgaggccgaccccaacttgaggacccagagcatctctatccccagcgacatggtcggttgcatcatgtgagtcagatttgacttgtgtgaatcgtctcgctttgaagctgacctcgtgagatctatcgtcgcctcagcggacgtgctggatccaagatcaccgagatccgacgtctttccgggtccaagatcagcatcgccaagactcctcacgacgacagcggcgagaggatgttcaccatcgttggaccccccgaggccaatgaaaaggccttgttcctgctgtacaatcagttggagagtgagtctggcctgtctctgcatcaatcgacgtcgattttgcggtctactcactcttgctggtattcgctcgatctgctaggcgagaagcaaaggcgcgtcggtgccactctcggcgagcccatccaggaggagatctgagtggacccgatagacatccatcttgactcccgctcggagctctgtccccaccctgcaattctctcgattacccgaaaaacgccttctttctcttctatcatgccttggatttgacgacttccctctctaccggccctcgtggttcccaccaccttgcgcttctctgacgattactcattgcgaaacaaacacaacgagatccgcctacccttccgctcacaaagcgaatctgggcgatcgatcgagtactaccatgacgttcgggtttcgctcctccttctctgacgcaaaagtaatggccggagaaacgcaggcgaagcggatcgcgagggacgagcggtcggttttcgttaccaagttttttcccctcctcttcctcctccccccgtgacattacgtcgaatagtatctctatcgtctcgttggtatatataagaagaaagaatgaaatgaaatctaaaagtcgtgcacacttgtcttctctcacaagatcgagatgtttgcgagggatctcctgcgctgcgcacaaagtctaccggagtctggcggaggacttgtcagtcatgaccgcaagtcaacatgtcgctcgattgacatcgccgcatcatccactgccagctttgtgctcatctcctaaggatacgttcagctactggtccttctcaaaaataatggtagatcggcgcgtacgtgaagtttacatcacgaaccattccaatcgcgtcaaaggaaacgccgcacgctcacaagtcgaacagcatcctcggaacgcagacgactttgttatgctggctaagagcgcgccgatcttcgctccgccgcctgctactacagctgtcatcatcaagtctagcagaattacgcatacgccctcatgacaacatcaagtcaggttggtggaagaggttcgtggccagaacaaataatgacgaaagggcggagtcaaattaggtttcaggtagaaactcgggcatagcctgtccccggtcgttacacagctgatggcgttttctttcagcgaggtagcccgtagtcgtgaaccttacgccgggtcgtcaaaggcatcccggcttggtcaagagtaccctcctttgcgatcgtggtcccccagatggtgatccacttgtctcgcgatgtttatctcgctcttttgtcgcgcacacgcgccggcaagtattaagttcggcgcaaagtggatcctcgtcgttaggggtctcggaaggttacgaacgagtgcacggttgatatggtcggcgtcgtttccgtcgttgtgttatggatttgcgaccgttggcggagcgggtcaggccgcacatgagaagcgaaggagcaatttcacgggctaatcacgaagttgtatgaccgacgatcggcagggtccatcgggcgtcgttctcggcgatgaaacgtttcgatcgcgatctcgacatttcagcatttacagctaccgcacagctccaccagccatgccacccacaaatctgatcttatctcttccaaatctattacgatataggccatcgtttttgaatcacgttaccaactaataaatctcaatcgctatcccatccacagcgcaagtcaacgtgctccgcccgccatctcaaacgaatccttcgccagtcaggttcagtagctctcgacctgatcacgatttcaagccctcctttaacctcttagacatcaaaccgtcggtcttggatgtacatgatctcgaccgagattctctctcatctcaaggcacagcgctccttcgcggcggactagattggatctgatctcctttgagaccacgcttccctgaagccagcaagaagaggatcacaaggcattcgataagctctgcaacgactatatagcaacatcttggcgtctaaaattcacccatctcaactgcggtcgactgtcggagcgcccactgtttgacccgctacgatcttcctgctgaggtccttgcgctgtcaccagtatcagcactcgtcagtgagtaacccttccgaacgacatctcggttacgtgctcggtggtaacctggctattcatgtcagcaatcagggtcaaaggtggctactcctttctggttcaccgttaacctgcgggaatcctccttctcgaacgaccactatcattacgctctacacccctcgcgctcagagccaacgtgagcaatcgatagttgactacaaccgggtttgagctgcggggttcacggcctgtttttgcttcccaaggctgatgccgaccctcgacttggttcccatgatggacatcgatcaagtccacgtgcagcagggtatcattcatcctgcgtatctccctactacttctcggtccgatgcaccatccagccattaccaccaggatgcagtcgattcgaccgaatgtatcaagaaagagaatgaagagctcaagaagcaagttgccctactcgaaatcttggtcaagcaggagccgggggctgtctggtcgccagcgcctcaacagactacgactcgccggcgcatctcaaaactacctctcatccgtttacctcctcgaaccgtcaccccgggttcaacaagccgtaggcaacacgcttcaagctactatggggcagacccaatcgggcttgatctgcggccgttgaggtccccctcgatagagtctgaggccggggttggaatgcctggtcaacgtccttcgctcaggcgtacatcccggtccgacgaggcactggtccgctctagctcgatgacagtgccgaaggggaaggggttggggaagaccgcgagcgcgaccttctttcagcaatgctccctgggcgggtctattggggtgccgctagacttaccttctatcaacgatagcgtctgtcacatcggcctggtagaacccgacagtgaacctccaccggatctgagcaaacgcctgccgcacacgccagagcccccgccattcgacattccacgtggcaagtcgttgccacagactgccgcccttccagccgaatacgtcttcgaatttcaaggcagggcaaatggatcgcaatccatcgtggccggccacgaggacctgtgggctgcgccgtaccctgactgcttgccctacggaacgactactcgtaattatgtttgctctgacgtcgagcagttaccagaggacacgctccccgcttctgccggaccgacgacactcaaggaattgtttacagtcacgccgctcgacaggacaagcctgagcctacgggagcctcacacggaggctgaacggtaccctgtgcaacgacttgacatgggaccgatcgagagagccgctgcgatcacgaaaagtcgaatccgactccctagtctggttgcctactcgatgccagatggatatagcatcaatagcaagccggctcagtttgcagcaccacggcttcgacagggcagcgacctcgcgctggctttgccacgtgtgcatggccgccaatctccggggacagtcttgtctgactctcagtcgcaccagacttttacccagatcagtatggccaatggcaagtttcgccctccgcgagggtatcaacgagccgcaagtcgacgttccatgcacgtggtgcgagaggacgataccgagtctgaacagagcacctcggaccaatctgcggaactctgtgcttctagcgacagccgttacctcagagctctgtcacagcgccgaaccgggcgcagtgcacagcgcgggcctcgtggcccaaggtgatcgtactcataccatcaccaccaaaaagggaaaacaaagaaagaatgcttcatttccattttagagggacgcaagccctgcctatgcgtgatgtggtaaagtcatatacaacctgggtgttgtttcgttccttgtatcggacaatcgccgtccgcgtgtcgtgactgctcttctactttgttttctcatactgtattgcagcacaggtcagctgggaggccaagcgcaaagaaattacgagatgtatatagacttacgaaacacatgtatgcctttgctttgaggacttcatcgagactagcaagcctcacagaagtgctaatgatgatttggtgagccctagaccgtcatctagacgtgagccgggcgacttactctgagcagtaacaccaaaccctgttgtcgacggggtggggagcggcagagctcccgtccatcgggtttgcaacggcagcggccgccatgtcaggttcgcaatgctcgtcctgcgtttcgtgagaggcagcggatgttcctcggttcttgattataacaccgggatcaacaagcacgtagcagacgtagtgaccgcttatagcagtgagaccaagatgaacaacgacggctgtgagtggggcaagtcaggtcagacgtataacaaccaggatatgcacggcctgacttgccataaagtctgtaacgcatgggcaccagttcgggaccggtatcaccaggaggatgatcctggtacttggctcgtccaactccatctggcccaattaccaccttgtagtcctgtcgctcaggagcaaggaagggactgaggtcgatccgctcggggaaagagacaaagtcgtcaatctttttcagcgccgcaaagcttccggagtacatgttggtagaggtgtgtttgttggattgctggaaccgcttaaagtggaagacgagaacgggcggtgctcgggcgatcatgtaccgcttgaaggctcgctgaagcacgaagtgctgggactttcgccgttgagggggaggtggccggacgacgctgagtcggccgactggaccttcatcactgctctcctcggatgaggtttggtagccggaagtacctgatccagacttcccagaattgctcgaggcgaccgtgagccggtcagtctcgacgctccctgtcgtactaggcctaggtgagcggttgacagtcagggatgaattgggcacgatggtctcttgtgtcggtgtgagacggccggtgggctcatcgtcagtcgtgacggcgatttcgggaacgatctgcggctcagcgaaagctaccgtgttacccttggcaggttgcgcggcgtgctggtcctcactatcgctgctactcgatgaggttccacccggaggcgggacgttggctgccaactttgccaatttgcgtctgtgtccacctcgcccagtcttgtaccgccagcacttatggcaagcaaacgcgttatctccctcgagaacttcgaccgcggtaaaattcttcatgctgtccatgaggtcagtctcaagtccatcgatcgatggcggtgtgatgccagcaggaccctcaggcagagtatgtaattccccggcgggttgtcctcccgcagcgcctaaaccctgttggacctgcatctgggccatgccgtttctcagcctctccaaaggatcatccatcgccctgggcggcaagttgggtccgttcagcaacctccggatataagccgcttgctccggccgaggtttagggggcttggtcgtgtcctcctcttcaatgctctcggccaccaaagagctatcgagcgtaagtccgacctgagagttacgcctggagctagtcggggtcgtctcgttgctcctgaacccggaaaacggatagatgtttgaaatcccagacttgggattgccctggaccgggacctgtccgcccgatcctgcagtcgtcgcgccaaacgaaggcctttgaggttctccgaccgcaacgtcggtagaatcgaagctactcgccgtgctcggcctcgattcacgccttttgcccgtccacgaacttaacgatgacctcttcttcaaccccttggaacttgagctgtccatcgagtcccgtttgtgcttgttcccgaagaacccggcgacgctagggggcgcttccgatccgctggtcatcgatacggtcgtactcgtcacgctctctttcctgcccgaggcgttggggaacctgtaacccggaccctcctcgtcggccgtggtcgaatcgtacttgtctgccgattgggcttcatgcactccttcgaggtagacactggagccattagctgatccggccgaaggtgccgacggaggagccgacggtttatgcgagccgagcttgaatttttgcgcgacggcctttatcctgtctcgctgtagagaggtaaaaaagttgacagcgatgccaggtcagctccaattcgaccctctgtagagtagaagatcgaaggctagacccacctttctgactttcggctgttggtttccgatactgagactaatatccatgaacccctcgtacgtgtgcgagacctgtaacaacccgaacgggacgatgagctttgtgcgccgttctggggaccacctcgtcaacgacttacactcttgcatccttgacagataaccacgctgactagaattccaccgaagagggcatcggcaaaggggatcatccgatccttgatcaaaacgccatcgaccttttcgtcccccgctggagtgtgagttaggtaacccccggcgccggcactgcgttgtcgggtgcgttttgacccgccggttttcgagtggctcgagctcgtcgaggagggaggctgcagaatcttgatgaggtctttttcctccattgacatcgagtcgaggaggtgacgaaggagctcatgggcgtcttgttggcggtactaatcgacgacaatagagcgcacaacagaaatgacggcattgagccgatagtctcgagcgagagctttgcaagaccggcttgacttacatcctcgtactgatcatactttcgacccaactctctcaacaaggctttcaaactgacgcttttttccttttccgccgaatctccggcgctacccttcttgctctccttttccccattctgctccaatgctaacctctctgcatccctcaaaccctcgtctttggctttccaggccttgcccaggcatttctcgaacgccaaggttactggcaacaggcgtgcgttttcgggttcgagcgcggcgtccaggagggaggggatcgagtgagggtagagctcgtacccgtccgagccggtcgctatggccgtgtaggatttcgctgggtgatccagcgaagcctcaaaaaggtgaggttgctcgttcgaggatgcggaggatgatgctgctgtcgctgttggtgctggtgctgttgctgattcggaagcagcgggcgcgggaaagatgaccggcccgataaggtcgatcaagctcgtcgtcgctgccaacgcctggaacgtcgaattgaagaaacaagtgttgccctcgttgtacaaccctgcaggtttagctcctgggccattggagaggatggggtgtttagcagctaggagttcggcttgaacctcgagcaggcgttgttgatgcgcttcggtccgacgggtcgtctgcaagtgagcggggtaggaggctcctggagctgccatggcggcgggaagttggcaacggtttcgacttcaacagagctgaggtctgaccgatcaccagtgttgagggtgaaagatgagaactgcagcgagttgacgggagctcatgatgatgatctgattcgatggaacccgcccacctcaccctcatggggttgttggtgggaatccactcggacgctcctcgctcgttcgctcgtggagtggaggttaggggcagagtgaatcgggcaacgcaccgcggattcacggtcagcaaggtgcggcgcggcgggagggattactcgctcgacggccgccgccgagatggtgaaacgtttgtcaacgcaagagcgggtctgaccaacccgatcctcgtgatattctggagacatctttgtccacgtctcgggtcatcgaccgccaccaaacaagttttcgatcatggatatcgagctaagatatgcatcattcacatcggggggatgggatgctggcgattcagcgaacgaggcaatggggtcttacaaagcttcgcagtacctagactacttggtctgattgaagcgatcaacggtctgatctcggagtgaatcagctgggcgcgcgaatcgagcctagaagcaacatacgctgtctttcgcatacgtcccgtatccttcgaaacctgtatattttgtcgtgtcttttcctttggaagcgccgatcccagccttttctgcaaacaacagggtcggcaccggggcttgtcggccctcgccctccaagccgagaccggttccctcggtccagcccatcttcttcaacagttggtttcccttgttgctgccatcttcacctggggcaggtccgggagcgggctttggtggcggaggtgtcggggccttggcgaatttacgcttgggtgctgcacgaccttcttcgggaagaggcatggccggttgatgaaacacttgtcgacgttcggcagctcgatcgcggtacgacagggtcgagacgttcgtcgagcttttttcgtcgacggcttcatcggcctgagtcgcagccttacgttcttgaccggcttgacatatcgaacgatccgcgagatttttctgtatcacggaaagggttgcatgcgtccaggtcggcgagaaagaattggccagttggttagtaagcatgtttgaaaatgtacgagtgacgttactcggcggagaggttccgccggtagaacggaattgatgcgagccttgtgaagatccgatgcgttgcaatgccttccgagaatgtcgagcgtcttgaattgccgctgacaaagcagacacgccatcttgttgatgtcccgatagtcaaagtcttccagtagatttgcactaggttcaggtgaagaagcctgctgatcgatttgatatcgagattcgcgtcaacaatagttccggaaacgttctttcgatgcccctcgggaagaaagaatgtacgcttgtgcttgccactggctgccttacaacaacagcgatggcgttgacgcctgctgtgtgcgctggaatcgatgccgacgcttgattgtgagcaatatccgccttgagttcgccttgacgtgtttgccatttcgatatgtttgacgccatctgaatcaaaacacccaatgcacgtgcgcgattatggaccctggtcagcggatgctcggttattgcgggatgaccatgggaagcgctctggatggtaggcgaatcatcatccagatgaaaggcatctttaccttcttgcttgaagctagaggaggaaccacgtgtttgcttcttcctgggaaggctgtcgaaaggtgataagcgcttagctactggcggcctgtgtccgtcggacgaagatgcgcttacttttcgagggcaaggcagctggttggtcatcttcctcatcgcccagtacattggcaggggatgcttttgatgggaattcgataggtagctagggtgagctatggcacccgctggcggattggttactcttaccgttgccagatgtttctcctttgatcaatggaattccagctacgggaagagctaccatgacgtcgtctctctccttcttcttcatcgtagccccgaagccaagcttgactggctgcatcttgaagccggttgcgcctcgattcaaaagttttggcccggccgattcacctgaatccttctttcccttaactctttggactgtgtcatccgtagacacaaccaagctgttcacgtatggctcaaggttcgggtccacggccatgctggcaccgggaggcggggtcctgacttcgcttgccccctggtaatcatcgcgatacttgaaccagccatccgcgtttccaatgcctccgttcggttcccctcgaatcagccaactagtctggaaaagtggttgagcagactcggggttttgcgcaagcacgaatgcctccgggttggcgaacgaacaggctacaggtttgccgttgactacgacaccaacaggttgagccacccgtgaaagcaagtgcgcgagaagggcagcggcgacctcggtcgatacgaattcaacaaaagccagacctgtcgagatcttggtgtttttatagcgaatgatgacgactcgtcggatggcttgcctcccgtctgtcaccggcccccgaccgttgcttggcgagttggctgccaaacggacaatctcggcgctcaaccgatctcgtacttcttcttgcgatgtctgagcgtccaggccccggatgagaaggacccggttaccattcccgggcggcccgatatctcgcatcccatcgtttccgttcctgtcgacgtgttctcgacctccgttcgaactggaggcagaaaagtctactcggacgtccatgggaagacagcccgggaagagcggcggaatgtgcaaatgcgggccactggtcgagcagtaatgcaagtcgaatcaaatggtgatcctcgcctttagccttccaccgggaactcactatcccttgacaaagtctatcgcactgtctaggctcgcaaacgccccgaagccaaatcccctggactgtcccgtcgctcgatctcgaacgaccgtgaacgaatccaaagccgaattgaagggctcggagcggaagtaagtcagtagctacgaaagagcgggggaagtgcattgaggggaatgagccgctatatctggccccgcatgacagtacccaagcgactcacgacctcctcgtccacgttgagatctagaccgaggaatatgacgtccctcgacggctcagaaggaggtcttgagttgtcgtacattggttcttctccgtacccttcatagtccagatgatcttgctgcggacgttgcgggtacggttgctgctggtaactctgatgcgaagtgggctggccttgatcacgataggtagattgttcatgccccccgtagccgtatgattgctgtggcagaggatgtgaagcgaacaaacacaactcggttagcaacgacttgaagctcacgtcttacacgagcggtctgcctcacctcaatctctgctgcatctcgccccctttcccatttttgttgagacggcacgggtatactgcaagcaggcacagctccagtgtgatcgttatatctgtcgcttatcatcccgttatcggccttcggcggtgacggtcttcgtcggggtcgatccgctgcacaagcgttggcaggctcagcaccagctccgcatggctatcaattgcgtggaaggagttcaagccgctacataccttgatacgcatcatgatcatatcgtctgggaggcggaatcctttcctcgtccgcgtaaggatctccacccgtctccctttctgcgaaacgatcgtgaccttgtcttgatgggctcctgcttctggatcgtctcgagtaggggtaagcctcccgagcacgctcgtagtaaggaggctgttctcgactggggtgagacgcagacgacaaggggtaggcggatgggtgatgctgggcgtcgcgatcttcgtaacgatggtaagaagatgggggaccccaaggaccaccgggcggacttcgtgaccgaggtctcggttgatacgatcccgatggaggaggccggtaaggaagattggacatggtggcgatgaacgaccgagccagtaagaggcagtagtatgggtggagaaggagcaggtgattaaactcctaatctaccgaacggagagtcgtacgttcgagctgccaagaagcctggaccgccctccttttgaaatttctgaactcggatgccttttcagatggttcgatggtaattgcaggtgagcgcgatatcgagcttgttaaaatcagtagtagttataggtatcatatttactgtcaaccctttgcagcacttgatgactttgacgactttgagagttcgcttctcggtcgacgcccgtcccagagcgacattgcctctcggcatgtctctcggcatgcgcgctagttgaacacaccccttgctcgagtgcgcctcatcgccctgcataggttgtggctctggtcgcaagcctctcgatactcatgatgtgtacaggtaggtgtcgacgggataaatatatcgctgcagtgctctgattgatttcatagcgtttctcatgactcaatgatcgagaaccggactcgtgcgaaaaagctgaaccggccgacaatcctcgacatgtgaggataaacgtccttcccgaaggcaccctttgtaccttcctttgtcgtggttcaaaatcctcagcatacaaagggtaaggtgataagattgagtccaatagcaattacaacaatagcaattacaacaatttaacaattcaatccaaatagcttcgcccgtacgcagattgcccccttgcgagtacccgttactttgtttcaaaatgtcttttacggacctagagatacctagacgattgctttggaaacgtctgactgatgaagggacggaaggtccgtctacctgggcagagtatgaagtggatgggacgcaaaagaatgacgcgggcggcgactgggatggctccggtcagttcacagaaactgggactctgcactcaatcttatgggcagtcccttccgcaggttcgatgccattgcgtttgactcatgctgtactcgccatcgcgctcaatcttggtacacctcaaggtatcaggaccaaaaccgaagaagcctttttcgatccctcgactcggcatcacgagcgaagcatgcgagctatcatgaacaaactggtagcctcggtggagaatctccagaaaatgtctatcttcgcggtaggtccaagtcgatagccctttctcagagctggactgatacagggtaaaacagttgccggaccctcgatccgagacagtcatcagcgcgctccagcgcgccagaagggaggccaaagatcagcaaatgctatttctctacaatgatgtgagtcgaacctccttgagacccgcgcaaagtcaccgacagggagcttgcaattgtatatatagcatggcaccttggtaagcatcttccttgttgcagtcacgcgccctttaagaaactctaacaaactttgagctgtgatatcaggcgccgactgagcagggcgagatttggtgcttcgactgcgattttccggtgacgccgactacgtataatccggttttcgtatctgcattggtagacgtggcactcccgtaagctagagaactttcgactagttattctttggacgagactgacttggaccttgcccgagctgcagagggacggtctatgtctgggattgcgataacgctggcaaagtcatcgatagcgccattgagcacgcgaagaggaaaggccaaagtatagcgactgaaagagattttttggcggagaaacaacacagactatcgcatttggaacacgacgttcactttggagcttcagcgcataaacaggtcctacccacggctgatgggctacccaggtaacgagattttcagaagcgccccaagcgcattctcgtggcacgtgtactcacgggcatcctcttttcagagacgttttcactgtttgcatgctatctccactgctgatgtcactgcgacatcaccttgcggccgacgatcttagattgacgaacacgatgactacagcgtgccctcccatcacggtagagatgatcatgaaactgccaggagacttgaataagagggatactgtgagcaggtttatacgcttcccattgctgtgaggaagatactaaaatcgttatgacagcctttgggagagatgaattggctacttatggcgattctagaagctatagcttttcaaagccttcctctcaatctttttcggaagttattccggaccaattcgggactagcaggtctggcgcggggcttcatactagcgtaagatctggtgagccgtggctacgaaagacaacctatggctgagtcttctatgtcggttacagccaaagagtcttaaggcagtatgactgtacccctattagctatcctccaataccatcaacacacttgcacccgctatggcaagtatgggatactgctgtggatgatctcttttgtcaactgccgctacaggaaccattgcctagtcaactgcacgtctatcgctcgccgaaattattgtctgaacagctctttgctttctcggctcagctcacgttattcgccgacaagcgtaggactagggatgacaggaaggtcactgcgcgcttgtgtgcgaattcgttgcctatcgtctttttcgctacggcaggcggcccttgccgcttactggcgctgactctgttggtggtacgtacattgttggcctcatacaaaccagcatggtatacgatgactgatcgggagtcgaatagcgatacctcgatatcggaggatgctatcccgtgtggtggtgcattgcgtgcggcatagaccaactccgaaaccgcatgctcaactgggccaacagcaaggaagcaagtcaggtagcctatgtctttcagcgactgatgcagagtgacgaaggacccgcattgctctctcagtacaattcttctacgggtagaacaactctctcctcgctcacaaggatgctgagcagtcaacaagacggcgattacgaatcgggatggtctccagacacggtcgccgggatcttctacatgatgacggttgcaacccagcaaccggggtttgaaccgaatttaattggagaagaccattggatcaccctggtccttgaacatctgaacagcgcatatgatgtcgtacaacagtggtcgctgttattgttgggggtcatctggtctcacgaagaactttctaaggccgaaaccctaaagacgatcctggatcttctcgtcgagcgcgtttctgacaggaatgaacagaccagaatcgccgcgctatactgtctgtggcaatacttcctctcgaacgcatatactcgggcggatgcgccgttacgaggagttgttttgcgtgctgccgctaggatattcgctacggctcagactgacgcgtctattttggttagaaggatgctgctgatctgtgtcgaaacaatccaagagaaaaggccatattggctctccttatccccgtggtgttacatggccaccagggtcagagacgaaggtgggcttgcactcgaggcggaatgctccttactactgcagtgctgcttgcactgttgtgatgattgcgacacggtcgagatgtccgcagaacgtttagcagccctggaagcgatttgcaatgctatcacacgcttatgtgacgatccagacagccaattggcttcattcgcccgggatgtcttcaacaaagccaacacttcagcacggcaatctgatgtagcgcagtttcttccgcttctcagaggtcgactggaagacatggaagaagtgatcgacgatctggatccagcgaatgatcatgtaaaaggggcatcaatttcgtctgacagcacctttcgacacagagacgatggaaaccatcagcaggatgtcatcaacgtctaccctcgattgctcgatgctgttaggcaaatcgttcatcaacatcaccctaaaggcagagatattccttatgttaccaaagacctggtccagaagatagaaacgtggcgccgccacatggatctatatttccattcgcctcgtcttgttgtgagcagcactgggggtttataatatttgcgaatttaaagccaagctcttacagtggatggagaaaaagctcagcaggaaagagttacaggcagcagagaagatccggcggggaaagtacgtagcattcgaatcagagagcagcgccgataaaacgtgggcggtggaaaaagcgacgatagacgtcgattctagactcaactcgataaggtagtcatcgaccgacgggtttcacgcttgacagattttgataatcctttttgtacgacaggtttcatgcgtttgaacctctcctggcgacgtcccaaccacgtcaaacagtgtcggtctgcatcatgtcgccctacggataatcactaaagcttgctctttctgaacgcaggttctacgacttggaaaatttaaacgctcccggtaggatcacctcgaccattccaagccgatggggagatctactatgcacacgtttcctcgaggaacaacacgatgcttcaacgatcatgcaggttacgtctgaaggagttgtgagagtccagcgagatgttctaagcgaaagctggaagaaccggacgaccttgctcttccggtgtcctcgagcgcccgattataatgtagtgacgagatggtcacccttcaagcaagaactctcgatgtcacctaaagcagggtgcatctcgttgtggaacctgcaggaggctcgtcagatccgcaagtatcgtggcgttcggaccaccgcaatcacctgtctcgattacgaaaaggaatccggcaatctactcatcgcggggtataacgatggttgtctggaacttttcgatcagcggcagcagtataagccatcggtcgccgtctggaacgctaagctgaacagaaaagctatatcttgccacttgactacggggcaagagattgtttcgatacagtgagggttccgacggtggtatgcgagggcaatacgctcattagagacattattgctatttgcgcagcgacaacggtgctatgaacatctgggatctgcgagttccgaaccaacctatctcaaccagttataattccgtcagttcggacggcaaggtaacgattgctgcaacggggatggattcggtctcactgtttgcacagtgagtttgtgctttgatcggcgagaaaatagcaagaaggtgaaacgcaattgatgacgatccgtttcaggctgtcaacctaccctcctgatacgtcggcagagctgtccattggtagggtgtcgttcccggcaccgatccagacgtcggtgctcgatatccccggatcgatatatcctagcgatcccgctcacttggcatttcatcccaactcgctcatcctcgcaatcgccacacctttgacagacaagggcaagaccgcggtctcgattcgaagcatcaattgattcgattcgatgccatcagccatctttttcttctttgtacatgattacgatactgtcctacagcgaccgattgaaggtgtttccgttttccgatccattgtcgcgcgaaccttcctccccttttctcttcgtattgtgtctttatcgaccctccttgccagcctcgccgtcatcgcctcggcttccacctcgttgcggctgagactggtcgttcgaatcgactcgacccttgatctcggtcttgaagccctcggggctcttggctgcctggttgatctccttgatgtcttgttgctcggcctgaacaaattgagaagaggaaattcagcgattcctgatccagtttgtcgtcttacaaagaccgcctgaatgacccaccttttccctcttctcctcctcctccctttcggcctcctcagcctccttttccttgttcctcagcttgacgtaaccttcaccgctctcctcggcaaccaagtcgacagccgagacgggaccagcgacagatccctcctgcttgcccgcgaccttggggttctccttctgagcgagcttgttgattcgcttcttcttctcatcggatcccttgaggtcggccttggaggggagcatgggaacgctagcgccagatccatgtccaaagtacgaggtaccggacaaggttgcgatgatgctgaatcctacgatgatggacaggtagaacctgtaagtggaataccagtgaggggctagtgagaagaagcgagacgattggggtaagctcaaacgctcaaaaagcatcaatgagacgcgctgctacccactccatccttgagtgctggcacgctgatcgagcagccacattccggtgaatcccgcccactgaacggctgtagcagtttggcagattgcgatcagccatagaacctaagaggggccaaaaccgtcccgcatcattctggactcacccagactgactccgtgagccatgaaggtggtgggccaggccatcaagacgggcacgacaccgagcgccagacgcttgtacccctgagaaccgccataagcgacaaactccataccccaatgcaaggcacccaagaacgacaggatgatggctccgtaggtgatctggacagtctcgaggtggtgcaaaagcgaggtggccgtctcgaggtcgattccggtaagggtgtcgttgcctgatcaagtcgaggatgcaatcaggtaagaactcgtcgttccttctcgcatacaacggacgtaccggcctgggcagtgccggcttcacgggccataaagatgataccaacggcggttcccaagtaagggaccgtgccgagcgcaccaaagttgaaaatgtgcctagggatttcctgggccagattcttggttaccgagagctgtagcaggaatcattgtcaataccgaggtgatgacacaagaggaggaggagacgctactcacgaaatcgtccgccatgggggtcgaggcgtgaggagattctcgggcaccggcggcggcagcttgaggagatcgaccggcgatcatctcggcaaagtccttgacgacggctcgggcctgcgacagtaaagatcgatgacactattagcgggaaattctaaaaatgcccgaaaacttcgacgctcacctcctccttggctccggtagttgtgtgctggaagtcgacgttcgactgcttctccacggccttgtcggcggtaggatcggccttatcggcccgtcgactctcgctggtcacaaactgcctcttcatcaaggcgctctgagccatcaaggccgagatctgaggtcttcgctgagcatcgaggatgttctgagcttggggtcggacggggagagccttggaagtcgacagggacctggcaaaggtcaatgcagagacgttttgtctggcgagcggacgagcggcttgacggaacatggcggtgtaattgatcgaggatcgatacgtagagagcaataagaagatggcctttggattcgatctgtcttgcaatgatgatcgatgtacttctttttcacacacttatacaatctactacgtcgtctaggatctcgctctaatctctaagcgaaccagattgagaggagacggggttgacgtcatcgcgcttgtaacggcggaagcaccgcgccattctgactgacgtgaccatatccgatcgggtcagagatcagagaccagagatcatggtggggtcgcgacgagggatgcgatcagatcggaccagcatgacaaaatactctagtgtaacagcttgattgcgagatgtatcgcccgtaccctgttccatacctcctgtgtgctggcgcgtctctaggtcagcgggtcgtcaaattcatttcgtaatcatgctttgtgacaaatatcgctcttcggacttcaaggaccggctacgggtccgaatcccaggctcgccgtgagacccgacgtccgggtggcggtttgggcgagctccctcaacagcctgttgccgtgctgagtttcctggttggactgtctcatctgcgccatttctgcctcgtacgtttcgagccgcgtggccacctggttgtgccgttcttgcgagttggtccgatcgttttgcctggctttgcgttccaaagcaagcgtcttccggaggtctgcaatctcagcagtgaatcgagcctcaatgaccttgatctcatcctgtaacgatttcgtgcgatcgttaccgctatcctcgacccaaaagacctgggtggtcaggtcctcgacgtcggtctttaatgtttggatgtcctgggcaacgtccgttttgagtttacgtttctttgtagcaggactgggcgcattaacagtggcaggagtggcagtagtagcaggggtcgggagccctgagggaacggtgggcgcggctggtacagtggcttcgctgcgccctgtcttctccgcgccgtccgtgggctggcgcgatactgccgctgcactgttgtttggcaaggggggtacgcccctggcaggtgcagccaggggaggaatgttatctgggacaggcgcctggatggccgggcgcttgccattacttggcccggccggtgtcgacgtctcggtatccgcgcgatccgacggtttccaccccttcctctccaacgcttcatccaaaatctcttgcacacactgggacagcgcagccgcggtgacgtcggccagctttttcacctttctttgcatcttctccaactcttcctctttcaactgtattttcttgtccacgtcggctcgctgtcggtgatctgccgggagctgctgtttgtaatcctcgaattgtttcaaactctctctagtctgagagagtttccccatggctcgttgcatgcgtccaaagcaactagagcgtaaaaagatcggggaaaggtttgacacgaggtgagaccgagagacggatttgacctggattgacttacctgacatggttcatcgtagaatctgcttgacctgctccgagagggaacccatccgcagtcatggttgtgatcgagttgtccctcaagagcgcatccctcgcccggatatccctcgctccgccgtccctcacgacctcgtcccgcggcccgtcccttgatgcctccttgctcctctctttacaagctgcagctcgcgtatcttctcgagcccggtccctagctggttgtctggggggaccatccctcgatcgctctggagaatctatcgagttgcttcttcgctcgtaccgggtcgatccaggcccatcacttatctcgcttgtcttgggtccgtatcttgtgggcgaggctccaggtcgagcgttatcccggctccgagatgcaacggaggggctttgccgataccctgcatctgaaggtcgacgtagagggtccgcagactggtactggtcgctgccaggtccataggctgagggaccgggcgcccgtggtcggggcgaagttgatcgttctctctgattgactcgagctgaaccccattcgtcgggtcgaccagatcggtgatctgatcgaggataagccgaagtcgacgacgaaggtctgtcatctctctccctatcatatggtcttggagggtacatcatattgaccgacgacgatggggtacgactctgtgtcccgaatgcctgttttgttgacgaagcgagacgagcagtgatgcaagtagtgatgttccactcgctgtacttcgctccaagtcgggcgtattcctcgaaccaataatacgacggtagtttgattgccttgcgaagttggactgtatgtaaggcaaatttgtgctatgcagaaactagctgtggacaggattgttgtacagggtttgtgatctgtgatctgtctaggatgtctagattatctgtctgatcttcccagaacgcgggacgcgacgacgaggaaagcgcgagcgagtcgatcaattaaaggggaagctagcagctgcagctggtggtggtggtcatcttgattatctcatagaatcataggtagtcatcgtatcaatataattgcgcattgtatcgttcagagtatcttagaaggccagctgtggaagataacaatagtataacgtcttgttgcatcagcctaccgcggcaggagacatgagtcaacacaatcatgctcagcagcagcaacagcaacctcgaccggcgttcaacgtcacttccgccatgaacacgagaccaaccgctcagaagggtcttccacaacagaacaatcagcacggtataactgatcctgttctttcgacgacagcgggttgaacggccgctgaaatgagcttctactcttctctctcaggaccgcctcaaacaagaccattgatgccgcacactaacacaggacctgcccgaccgcaactcgtgccggctctgccaggacaaggaccacctgttcccggattagctcctccacctcctcagaatgcaatccctcctcagctcgtacgcatttctcaaccgcctccagaggacagtacccctggaccctctactctaaaggtcacgcaggccaaacctggagcaggcaagtggtcgaaacctctcgaggttaggaccgatccccgagcagtcggtgagtaacctgcgcaaaattacctcttgagatacgcacatggaactgaatgctgcttcctacctacctgcttgttgattgtagtctccaagctactcttcgtgcacggcgatgtcgaaaccccgagcacggaagcagtcgatttcgtcctggatatggcatacgatttcatggtccagatcgtaagccatatgcacagcgccctctccgataaggtcgtaatctgatcgtattgatatcgatgctccctcgtagatgaatccgggacctgcccccaaaccctgtcctcctcatttcaacgcaacctcccaatcccaaacgatcacgacctctaccctacgtcaccgactccgaggtccacacaatcggaaaaagctcgccgtccttcaggaagccatcatcaagcaaaagctcgccgcggacaaggcgaaaaaggcggcgatcgtggaaaagaagcccaagcgcaaggttggggaaccgggcgaacaagaggtgaatgtggaggatctggccgccaacatggacatgcccggcatgactgggtttggtggtatcttttgatgcgagagcccgttacgaacacttttacgatctataacgatatcgagatgtgaaatcactcgctcaagaatcagcatcaatcacacatgtgcatgtgcaggtacttggcagctcagggtcgatcactgctgagccgtataagatgctaccatggaagcactttactttcaaatacaatcggtcctactttccgactgaaattttgccgcaggagtggctgttctgtgttaaggtggcctcgagcttgacgagatgggcaactcctggatcgctatgacgtcgtcatggtcaatcaggaatctagggatatacaattactcgtgtcatgatgatgatctgtgcgatgatccgttcaccccgaactacctggcttggtgctgttctgtccgggaatgttgctcgtttccttcttgacatgcgtaaaggtcccacctccgaaccacctgtcattggctgccgcaactctttgagcagcggaaagtgaaggcgttgcgatctcgatacctgttcgagcgacgtgaagctgttaagaccgccgaaatcgtccactcgtacatcatttacataccttggaccggcgtgaaagccaagctggtggcggtaccagacaaggtcgggttgttgctgctctgagccgctttgctaagcagctgtgttcgcagtcggttcgatttcgacattttggctgcgagtgtgacagcagaaacgtcagccatcaatactcgcttgcgacaatgaagatcgagaaatcttacccttgctggcactgttgactgcttcagccctgatcttcccgctcgaactgccgatcatacccagaccgacggtctctccgcccaaaccagtctcctcctcagcttgaccaaacaccatacggttctgcagcttgcgcagttccgtctgagcaaatgcttccttctgacttcgagctctataaagtcatacattggacgatgagcaaggactctacagtaaaacaaaagcgcacgatgccgacttaccggcgacctcctcgcttcttcctgtttgtttcctgagggatcggcaaggctttggtgatcttgcttggtgggggttcggccatcttctcgatatgcttgaccagcttctcgtatagctcctgtccaaacgcacctgtgttacgcgtttcttcagtgctggtcacaaagctaaacatagatcgaccagatccgctcaccatccctgcattttctttccagatcgactcgaccggcaaggacaagcttgctggctacggtccgctgcaccttcttacgcagctcaggaggtgctccctgcacaataggcgattggtagacgaaaccggtatgacgttgctgacccgctgccgacaagtacgaggtggccatggtcttcttcaaagcgccgaagagctaaagaagaaaagtgaacggtgtttcagcgattcacacttggcctagcatgaatcgtcccggtttcaacttacgtagatgttacagcttggcgttttggcaaaggcggcgagacctccggctacaccgagtagcttggctgcgatagtagtgctgatgatatttgagacgttcggtgcgaggatgttcattcgggactcgacataggcgaagatctatatggtcggtaaatcaagtcagcgggttgacaaagaacacactggagcgatcaaaatgcttaccttctccctggcatctcgcaattcaactgccacctcgcatgccttctcgatgacttgccactccccggctgagagtaatcttcctcgcgagatcgaagcggtcatgctaactcccaatccatgccgacctccaagaggggtcttgggtttggtgagatcttccgcatttccaattgatctcactgcgttgatgtagtcccacggatcaccgataatctgctccaactccgggaaccggacagaatagtgatcacggataaactacgcaagacgactagctattagtgatcaggacatgttgccaaagctataagcgaactcactttatgaacgagaagaagttcgttgtccacttcaacgctcaagttgttcgcttgaacgatcaatgcgtattcaggattctcctctatcgggccgctctcaacggagttgtcgatcggcttgtccgtgttcgagtagaattcaattttctgagcaaaatgatccagaggttagccagaaccctacggtattcgttgtaagctgacagacttacggtaagtgcttcatgcagccgtttagatttgtgcagcttaaccacagattcgacattctcgatagtcttgaggttcatatgctcgacttcatctcggtccagctcttctgctgggcgagtaccacctgctggcacatagcccgccgcagactccccattttccagcttctcctcctcttctgctgcaggtttcatgtcctcgtcggcctcgttctcgccactgcctggtagagctggaggacccatgtcaccgttggaagccgagctgggtccggcggtcggctgctccgaatcggatggacctccgtcatccgacaggccatccaaatcgttcatcaactcgtcagctagagacatattggtggttctcggtgactctagatctcaaacgtagcaatccagctggcccgactacaatggctggcaaatggcacatcaataatcatttactcgaatagatgcccttgctagtccaggagcgttgcgcgttcggctccgaaagatcgctcacgtaagcagacgggtggcaacttctgcaattgctgaagcgtgtcagcgagactagcttgccggggttgagtgcttgacgaccagttgcgaccagagaaacaagtgaaaccttcatcctggagcagaaaggaattcaggtgacccgatgcaactctcatcaacatgcagtctcggttcatcatattattttgttcgatcattcgttcatacgactaggttggcaaaacatctggatgacacttgtcaccgccgtcgttcgatggccagggccaaaggcgagaaagatcgtgctactactcggttcgtcaaaatttacatagtcttgtcgagcttgtcggcatccgagtacgactcggcccggttgtccctcaacaggagaggtgcagccgagatatcgtcaaggggagcctgctttccgttgcttccgtgctcgctaccagaaccctgaggagagacctgtcggctgggcaaagaggccttctctgcacgcctctccatcctcctgttgtaggcagccgatccccggccgaaaaaggtgcatcggccctcagaccacttgttgtagtaaagaccgcccataacagcgatccagtagaatacgtaagagagaatgcttccaaggttggcatcgttgttccagcctggaagagcaaggaaaaagtcagttctgaacggtatacatagatacaaaaaataggacactcaccgacgatggcgttggcaagctgagtaaaaccgttggaaccgatcgcaccaggctcggggttaccgtctgaagcgtcgcaatatggtgagcacgctacgggagtttatattgcaagcagaccggcacgacttacaggtcaaatgccagacgttcccctggacctggtaagatccgggtccgttaccggtctctgcaacatcgcctccaaccttcttagcgaatcgctgtagagatgataggcataagcgatgttgtccacgttagaatgtgctttgtcgactcacgtagtattgtaagaaccaaacggccttggacataagaccggcaccgatcaagaacaggaagcaggtagagatgaccaagaaccaatgcagggcaaacgtcgaaccggttcgatagatcaagtaacctagcgattatacctgaacatcagcaagatacttcgtacacgattcgtgccaaggccacttaccgaccgcggcaccagcgatgagaccaacaatagtagcgatggggatagaggttccagattgaccgagagaaaccttttatagggcaaatagtgactagtaagcaaagagcacaagcgacaggaacagaagccatgcagcacttacaccaccaacgaagacgacggcttcgacaccttctcggaggaccgtgatgaagggcaacaagaacagtgcccactttccgttcctcgcctccttcctggctcgagcagcatcctcgggcttctcatcttccagcaatccggtcgaagtgaccttgttgtcgaaagcctgagcgagcttgatcctccacttgacacgggatcggtccatcttcaagaaagcgagtcccatgacgtaaatcagaatggcggcgatgatgctgaagataccctcccagagttgctcgctcttggcccagagatcgctcagcttggtgtagaactggaagaaagcagcgcgtcagccgatcatgcaggtagtcatcgtggcgtacacatctgactcaccacagcgatgaaggcagcaccgatacaaagagcgatgaacaatcctgaagcagcaccagcccaaatctggttcaagggaatgtgatgcatcaggcggcgttcgcaggacttctatagaccagaaacaacttacctggatacgcatgcgcctaatgattcgcttgacgcgagtagtctcgccatcctcttggtctccttcagcagcggatcctgatcgaggagcgagctggccagagctcatcaactgttccacaaaggacagaagtaccctatttgttgcgaaagtacgttggatcaggacgttttccggacgcagagtaacgtccgctatcgatgcttacgagacgatgatggccgcttcgatcgtctctcggaagataatgaagaagatggagacggaaaagagatccttcgccatcttgaaaagtttggtcctctgtttttatcgagtactacacctcgaacgtgagctgttcaatgtcctgtcaatctgaacagaatacgacgaggcattatctcgattctctcggtacatctctatataaatcgctcattccctcgctccgagcccctcacccgcgaggggggggtgaaaaaaggccacgacggggatgatcggatagactttgccatttcgcgggctatcagataaccgggatcaaaatcggttcgttagtgcccctgaagccagaaagcgcgcctcttctggctcgcttcctccccttgccctgcggcgctctttgatcgcgcttgtgccggcatgagggaatcgtccgcttccgatgaccaccgtacagaccagggagtcgatcttctattttcgtccgctccgactctacggccgtgaggattgtcaaggtttccctcccacccgaaactctatggcggggtgaggcgatgagcttgttgaagtgctgccagttaccaggacctctgaatatcatcatataccttgcaagcggtcgcttagcacacactagctcacatcgttcgctgttcgccctgttcccgagcagggatcgagggatgaggcataattgcccgatcttttagctcgaattgatgcgagctgacgacagtgagcaaactcattttgcatcgcttaagctcaagcttgtcgatacccgacggagttagacgtgaacgagcttttcagcagcatcgacatcgggtctttccgcctgtgtttggctcattgagcaagcctgacattctcggtgatgagcagacaattcgcaaggtatgccgttcaaccttgcatttgcactgttcacccgttggacactgcagcataagattgcatccaaagacggttgttattcccaccacattttgggaatgtatcacagtacagtcacactcaaagacagatcttggtgttttggtccccgcaatgggggcacttgagcgtaacgagaatacgtgcagaccgttgactatttgactggtagggtcgcgttcaaaggacggtcttgctgagatcgtgctaggaggcagggattaaggcggcctctcaggcagtaatgcgcaacgtcaacatgagtacaagtttgaatatgacaactatgggcgaagtagagtgggacccagcggattcgtcgccggttagacaacagtctccgccagatgacgttgatgccattgagtatctcacgtccgcacctcacgtctatcgcccaggctgagcggccagcttgaggcaacaagcttatacacaatcggcagtcctggtaagcgtacgcgtctaacagctttccggatcgttatagcatcgtgttcgaatagatagctcgttcgctaatgaaagcgacggccaccgacaccagcgcaaatgatagggtttactgaatgtcctgagagaacgaagaattcagctctaatcggtcgacgtacgtgaggaatcgagaactcaaactgttgaacagaggttaggttagacatttcttggccttaattacgggaagcattgcaacaacgttcttgacgggcatcatgcgaacagaccagctatgattttgattaagtgtggtgttcgttgaccactctatcgagcaatattcagcaggcacgaacagacgtgtagccagccggaatggcgctttgaaaaggtctcgatcgcagtatctcctcagtttcatgtcggagcgtcagaagccctgcgaaatagggtatggatggagcctgatcgaagagaaggatgttatcgacgtccagctagcgggcgatagtgtatccccgatcttcagcacgctcagcggtgggccaattacaatatgatgggcatttccggttcagcgagaggatagtatcggttctttacgtgtagcttcctgagcatgtgcggcacgattgtatggtcctagtgttgtgcagtgcggtggaagtatatgtgtctggaaagcttcgctcacattcgattcctgaagtcgaagaacaggattatacttcaatcagtcaccatgaatgccacatcgtatgtatagaggagtttcacctgacggagggcgtccctcctttgcggtttcgtcaccttggcttcggcgcccgctcacggtccggtcagtcgttacggcatggcatggtcgaaccggccctccacctggaacctatccgccgatcgacttggtcaatccgaccctcgaccctttataacgttcgatgtggacaatgacagcctaccgctgtaatgcatgcgcacagagtggtctctccattgaagatcgatctagattgatatgtcttctcctccagaggagcctgtcgctcgatcagcgaccgctcgacccccagatgctgcgagcaatgctcctgccgcaacgcctgcggcgccgaccaggccggccgttccatcggccatcttcttggaacaggctgcactacagaatcagcaacagcaacgggctagtatgtctagcttgatgttcatgacattcttcttcttcatgatgtcgggtgggagcccgccgctgggtatagacgagatcgagcaaagacgtgagcgacctccatcgggtacgagcggtcgttagagctaacacctaccttatgcttggctaacgcccacagaccacgacatagacagttttggggatgctgtaacacagctacaactgtaccttaacggatctcaatcgaactacagttttgtaggtcagatcactcgcaagaagagaactagagctaattccaccgttttgaaatatccagtcaccgtcgccggtgccatctggcctaacgctccttccgccatacctgcatagagatcactctcatgaggcttcgtcggaagaagatggcacagcgttcagtccgcattactttcagaacatcacagggttctatcgggaggccaacgctcattacctgaacttgacggatccttcctcctcgaattcctcccaccatttctttcaccatcttgaaacgagccaccgaggtcctcgtccacatacgatagcaccgctcgtcaatcagaccagctacaacgagaccgaagccgtaaagaagagaggggatttcgactgggctgcggtcacgtcctggtcgatcaacattaacgagaaggagattgttgagcgggacaactttgggaatatcgtgcttaacgaacgggaaagcggagatcatcactataaagggaaatatgactcgtgggatgactgggcctgggtccatgtggtatgtcgttctgctttgatttatcaccaactggatcgatacctgatccgaaggaacctcagtctggcatgacattcgccaactctgacaagagtagcgtgctagactaccagctggccggagttcaccaacgttcgaccggcgagtatacgcttttgggaatgcctgctgggtgagtcgctgcttgctttcgttcgcttgtccctggcagcggcgttgaatcgataaaaaacattccagtcaaggcatcgatatccggctactcccttctctgcttcccgatcgacaagcgcgcaacttgactggtaaaatggtcctgttcgaaatgcagaaacatctatcccgtctgcgatccgatccgactttgggaggaagctctagtagcagcagcgcagaagatggtatgtcgagtcgtggtagatctgagagcccgtccttatccgtcgttatcgcagatggagagccttccagtgatcctgcttgccctatacaggttcatctcaggttacttccagtgcctttcccttactctgctcatctgctcgaggagtacgagcgcgagatgcgcgatccgactggaatctacgtgcaaggacctgcgaacgggatcgaagttgaaggggtggcaatctttgaggaatgcggcgtagcatttggtctgaccggtggccagggaatcgcgtgagtagccgttgttgcatgcgattcacaacatccgtattcattaccgcattgcaccgcagagccgatgctttctggcataagtccatacactgtcagttacttcatctgcgtttcatgaaagccaatgattcacatactgctcccgacagacgctatctatgcctcggtggcaaatcttatcatcttgttcttgttcgtctgggagatggaagctacacggacccccagcgcgttggccaaaatctcgttctggagcattgtcctgatgatcggagccgatgcgtggcttttctcggcggtacgcatattctgtgatctccaatccgcgtgcatctgactctgatctcaacttggctcctctctatctcttccacagcatgcggtcgtggccatcatgtcggacaatgtcacgaccttgccgttgcttctgccttcgttcctctgcctttgcactgccctcgtattcggcccggttagtcgacgcggaatacctgattgatgatcgctgactgaccgccggccgggcttatgctagcgattcaccgtcatgttacatagggtacaggcaccagagtcgccgggaactccaacccgtacgaacaccaatgatgcgactgtgaacgttgatgggacggccgcgggtccagtcggcgacaatgacgccgggacggcgggaacttcgatgtcgagattggaagcactccaaaccgagattaatagacatccgcatctgcgctgttagtccaaacacaggagaaatctatcgcccttgttgctgacaaaagtctcttctcatctacagggttgactctgatgctcttctgtaccttcctgatgttcatcggcgtactgcctcaggtcgttcctctcctattgggcattctctattcattctggatcccgcagatatggagaaatgcaagacgtggcaatcgcaaatcgctaacttggagattcgtcgtcggcatgagcgccgctaggctcgccttgcctatgtgtaagtggtcgtgattttcccctacctggcggtcattgaacacgccggactctatcagatgccttcggttgtccggacaacgtgtttttcgttgaaaccaatagtcagtctgagttaagacatggaagcgggcgtaagctgatcgacatcttttagaatccatctggctgcttccgatctacgtgtgggcacaggtatttctactttgggcccaggaacggttcggtgcctctttcttgtgagtcgtttaagcctgtgcccggatatttgctgagctgatgtctctcactcggtcatcagtcttccgcaaagggtaaatgatgccttgtcgtgtacagcgtgttcctgggccctaattgacgcaagtcgagttttcagtttgcgccgcctccaccctacgattaccatcagcctttgcctatcggtgactcagaatccggtcagcatgacttcggcaactgctcgatttgcatggagccgatactcgtgaatcacatcgggggtacccacgtctcaggcgacaaacaacaacttgatgacaagtttgcgcttggatccaccgccaacaacacgggcgctgtgggtaacagagtactgaacatcaatttccgacgcacctatgcattagcaccttgccatcatctctttcacacggattgcttaaatcagtggatggcaatcaaggtctgtcggtgctatcgcaacaatgacgagtttttaacgaaatggtggctgacttcggagcctttacagaacacttgtccgctttgtaaacgaggtttaccgcccctctgagccaatttcttcccgttgtatgggtcatatacatgttatacacagcctggcaaactcgcaaagtcgagccgaggtatcgaacatttcgcaagtacatactcgtctctcttggcgagggcggtcttgcgtaacaaagctcttcgtgccagttttatggtctataatggatatatgctgatctggatgcgtcgttcatgtcgtggtatggctggaggagctgatacaaacgcaagaagtcaatcgtggccgatttcgaatcatcttgaatcgaaggactcactcaagaatcaagcttccctcgcttttgccaattcggcttcaagtctctcaagcttctcagcgtgttcgaccttcattttgttgatgtcagattccatcgcctcttgggtctgcacaaaaatgtctttgctcatctgcgccgcctgtttgataacaatcgaaaattaagcagactgtgcatcatatcgttcgagagtcttacgaacctcgcgagcatctctgagttccacatctttcgtcgccagctgcttgtgaagattgttcatcttctcttcaagctcggcgaatcgagtctccgcttcattcagctgtactaccctctcttgagaggcctccttcaggccttccacctctgccgcctgggctttcaaggacacgtctcgctcgttagcaagattcttgctgtggtcctccaattgcttgatctgggcagcgtactcttcctgcagagcagctaaggctttgacctggtcttgttccgcgcgagagacttgctgggactttgcgctctcgagagccttcgtttccgcctgcagatccgtgattcgttcttcaaggagcttgaggcggtcctcctgctccacgcgcgcctggttcgccgccacttgatgatccttcaagctttgttgcgccttctcgtgaagctcgtgtaacgccacagcctcggccttcaccctggttgtttcttcctgagcctgcttctggctgaccgaatgcgccatagcctcctgggtccggcttgagtcatggagagcctcgagttctacaattcgagcagtatgctggtcattcgcgagagcgagctgactcagagcagcgtccttcgccttctctagagcatcacactcttgtcgaccagtgacttgagcggactccaattctgctttgtaacgctccaattcggcgtcctttgcaaccagtatctcttgcatacccttggcctgttggtcttgcttagttacgagatcgttttgcatctgctgcatagcttcctcgtgagcttcttttatacgagtgacttcagcaagatgtaccgcatccaattctgctctgatttgcgattgatcttcgggcgtggggctggtaccgagacgtctctccagctcttcgatacgtcgcagacgatcctcagaccgagttttctcttcgccatgaaaccattctgcatcagccgtgcgctttttggcatcctccagagtaggttgaacggcctctaattcggctcgaacgctcttaagatctgcctccacatgctcgcgctccaactgggttctagtcaaatcatcttgagctgacgtcagtttggctttgagcgctgagcactcgtccttcaaattgttcatctcctcaacgcgaccgtccagggccgaggtttgcgctgccagttcggtttgaaccgtttgcatatcggcgaaatcggactcgcgctgcttctttgcagcggagaggctgtcctccaactcgccaattctgaaagcggacttctggttttcaatctgggccaactcttgagcggctctggtggtctgtaagtcgactcggaggtggttgcgctcctcttccactttgagaagatcttttcggctcagctctgttgctacttgtagactacctgcattctccttcgccgcagtaatgtcaatctgcaggttttgtacttgcgttcgataggccccgatttccgttttaagggcagataattgcccatctttggaatcgagggcgtcccgagcgctagcaagttcggtgtgagcggactccaattcggcctgcgcatcgctgacaagagcttgggcagccttgagatcgcccttcagaacatcgctttccgacatgattgattcttggaccgatctcgcagtctccaattcctctcttgatgacttgatctgctcctcaagctttgtgatctgcttttgagcgtcattgagttgcgctgccttggcatgcagagtctgcccgacttcggtgaggttgtcattccgagctttcatctcatccagctcggacttcaaggcatcgagctcactctggagagagctcaccgcctgactacgggtcatcgattcctgctcccgttcttcaagggcttttctcagcactgcaatttcttcctggtttgtcttagcttgctcgccctgggccttgagggactcaatctcggtgacaagggtctgatgcgcatcaagctgggctgacagctcaatctgcttctcttccagcttctcggacaaagactggagatccgatgatagttcgtccttttcttgcgcaacaatgcgaatctcatccagttctcgcaacgctttggtctcggcttgctttgctctgacgagagcttcttctttttcggaggatgaggtctcgagcgtctgtacagtcgcttcaaggctttgaatttgggcggttctatcagcgatctccttcttgagagaggcgatttcatcattcgcagccatatggtctcgttgagacttcgccgcatcgtcctgcagactggttagctgctgttccatttcgtctcgctgtcggaaagcgacacgagctttctcatgcagttcattcagagactccttcgctgaagcgagatcgtctctgtgcctgtgagcttcagcctcgaaactctcgagatctttctgctggattgtcaacttttcttgcagagcagcctcgttgtttgcatgttcggcagattcctgacggagagtctcaagctgtgcccgcgcttcaatagcttgactattggcttgtttcgtttcttcctcgagctcctcgatttcgcgctgtccagcttgaattcgctcatgcagagtctgatcacccgcctccaagtctttggccttggatcggagggactcgatgcggtctcgtgcttgccccaattgctgctcgagcgactgaagctgagaaactgtttcctccagctcgttggtcttgaactcgacctcggtcgtcaacttctgctccagcgattgcagagaagcagcgtgtcgctcattacattctgacagttcctcagcatgactcgcttgagctgttgcgacggactgctgcaccaacttttcagtgtgactcttcgtagcttccagctcggacgcgagctgagatttttgccccttcgtgttctcgagatcttcttcggcctccgcaagtctgtccagtgcagtctgtagcctttcagcggccgctgcggattcctcttcggcatgtgcttttgcttctgcgacagcggcgtccaggtcggcatcgtgagcgctcagattcttctcaagcgatgtcgcccgactttctgcttctcgccattttttctccgcttcatcgacgttctgctcggcttgttcagcctgattccgagctctgtgctcttgctccattgcactttcgagcttgctttgtagatcggcaatcatttgcttgttaacggtttcgatttcggccaccttggctgtcaagaattggacggtttgcctctcctcacgtaattccgattcaacgcgttcgagatccttgtttgcagtttcgctggcaacttggcgttgttcgacagctttgacccgatccgcttcggaggcagccaacttcgcctcgatttcagacattgactgtgtaagagtattcttgtcggtatcacgggttttgttcgctacggctagatcagcttccaagtctctgattttggcttccgcatcggcgaggcttctctgggcatcatcagcatgtcgatcctggctttccgatgcagccttgtaccgtgcggcatcctcttctgcacgagcaaggcttgcttcgaggtccatgatacgggcatcgaggcgctttgactgcgctccgccgtcagcgcgcatagctaccaactgattctccgcctgctcccaatcggccttttgcttctgtagcgagatgaggtcactctcgagccgtttagactcgccatcaagatgttggatccgaacatgtgcttgatcaagctggttttttgcatcagccaactcggcatgcgaggactgcatagccgaatcaggttgtgaaacggtctttgggtaagatatatcgtcatcagtacggtctcgcaagcttgattggcaaagaaaaacttgaactcacttcgacagctttcgatttttcggtcaagtcacgttctaatttgacaattttgtcttcgagcgctctaaggccctccaaacgcttctcagcttctgccagtttcgcctacagaattgcacacctcctttcattagctgcctggacactctcccttgcatgactcacactcacagtgagggcagccaggtttgcttcaagagtttcgatcctgttgtccttcttcgcggcctcgaatttccattgcgagatttcctggttgagtgtctcgacttcagtagaagttgcgtcgtgcgtagaggtaaggttttcatatctatcgagagcagacggggggtaaatcgagagcggtccacagctaagccgattgtgcttacttggaaacgaggtcgctcagctctcgtcttgtcgcgctgtacttgatctccatctctttcagtttgggttccagctcggactaggcgcagtgtgcctcgatgtcagcagatcgattcggtcccaaagatacaatgattacagaaactcacagcatccacaccttctttgcgaacctcggccagcaatctctcacgttcatcaatttcccgcttacaatccacaatctccttgcgaagtttgtcgacttcaacatgagcgtccttgagctatatgtaacgaatcgccatcagttcgcgacgtccaatcgtgaacattcgtagccgaactcaccttgacctccatctcgttcttccttgcagtcattgatctggctaccacggtacctcccgcagtggtcgacctgcctgccgccgaagctccgactcgactggtactcgcgatcgagttggtcctggtggcggctaaaggaatgacaaacgaatcatcccgcatccgtatcatggaaggttcacgggagtgagcggtgccagcgatggatccggaagtcatggaagccctcatcctgacggccgttggactcttgggtgcggaagcggaggaagccgtggtattacccccggcagagaacgaccttgctcctgtcgcattgacccggttgacgccgacggcagcctgagctcttgccgtactagcgagaggagtggtcgacgtagatccagtagtgactgtcctctgcctggcagtgtccaccttgttcgcgctggtagcggtaggcgcggtgactcgataggggtgtggcaaagtgttcttagggggcaccgggggctctctagcgctggccgacggtcggctaacgggaggttgcggcaaaggcttgtcatccttttccttggttctcttttcttcctgaatggcggtagccttctgagccgagctcgccgtaggtttcgtcaacgacgtcttggtggtgcgtacggcaggcgcggtggttgtggtggttgtaggtttcgctgtgagggcaggggaaggtcgaaccgaggccttgcccgctgtgtttcgtcgaaacaagcctgcctttgatccagcgacggaagcggtggtagcagttgcgactgcaggcttggctgtgcgcgggcggatgatgtacaggtatgggatcagttcaatctgctctccacgtaaaaggctgctacccccgagacaagcttaccttcgacctttttgaccgaaccggcgctgtccttcctcgaccccaaaacggccctcttcacgccttccgccgaagcgctcaccctagccctaaacgccggtcgaacagcagtccctgcagtgcccgctgcagccgtgggtgtagaagctccagaagcttgcttgctgtccgactctccagcatgagcagatgtacgggacgtagcctcgtcggctgttacggccttgacgctctcgtcgctgcccttttcttggacccggtccaggctggacctcttgtcctgcgcgtccatgctagccctttcactgccgggggctccggttttatcgctcaatctactaccgcttctacgaagaccctcactgacgcccttgaagctcaatcgcttggtgaacgattcgacagtcttgttcccgccctgttgagaccgtcgggaggagagttgcgatgagggtgtgtcgagggaagggtcatggccaaccaggtcggaggaagagacgaggacggcatcgtcttcgtcttcgtcttcgtcatcgtcatcgttctccgagaatgccgctttgtcttcagagtccatgacaggaatttcgttttcaaggtcctttggtgccgagggaaaggcagtgagggagtcgacctgaggtgaagcgacagcgctgggcgacagctctgactgtctttccgagacgggctctgggtccgctagggtcttgtcatcctccatagtctcctcgagctcgactcctgactcggtgtcgctgccagcatcacgcgattgcgcagttttggtggctggaactgtattctctttcagaacctcgtcgtcgtcagctatcacttcgacctgctccccctgatccttggcaagggtggccttgtagctggcctgcttctcgagaccacgatctttcgagatctcgatgttctccttgtcttgctgttttaccaacacagttgcagattcgtcggtcatgttaggtcgtgatgtggcgcaaggatcgaaaggccttgccctggactaagctcgaactttcgttccggggttgccgtgagatgtcgtcgtggtgtctagagtagtgtgttgattcgttgtcgtgaagtcctggttacttcccgagtaatgtataccactaatcctcgaggctgatctaaggagcggtcgattgatcgattgagacgggatatatcggaaagcgttgggtatcaaccaagaattgatcgaatgatttgatgaaccaagtgtgctgcatgtgctgtttgctcgcattgctcgcatttgatcgattgttgtttttgtttggagtttgtcccccttcccccggtcgttcacatggctcgtacgtaagattaccgaggcggcagacgaaccgagcggaaccagatttacttccgtacatgtccgtgagattcatgggagaggagtaatcacaagttccaatttatctcgaatccgttgcacgaacacacagtctgctgcctgccgctgccactaccgctgccaaccgcacagcaacaattcgtcccggggccatctcacatgcccagccttactctgacgaacgccttggtcgctctgggtgtcttcatcgtcagccggttcatcgccatgccgctcttcttccgagaacgtattgattactccggaaaggtacgctgcgtgatccctctcttcgcccgacctatacgtctgccggcggcaacgttcgagtccacttatcttatacacacaatttgttttcgtcttggtaacatcacagcattgttacatcaccggcggatcttcgggattgggattggccctggcggaaggactcgcaaagaaaggagctcacatcacgatcgtcgccagggatgtgaaaaagctcgaacaggccgtcgagaagatcaaggtgagtccgctcgatcctagctgtgatcgtttcccgtccgaatcctcgagctgatttttccggtatacgaaaccttccgcaggcccaagccgtctccccgacccaaaacatcattcaaatctcgagtgacctatcacaattcaaatcctccgcgacggcctaccggagatccatctccctacaatccggaaggatccccgattatgtcttcttgtgcgcaggagcgagcaagccgatgcatttcgtggagatggatggggatgacttgacatgggtgagtctcgatacctcgagctcggctgacattcgagggccaactcaatgctcttctttcgatagagcatgaatgcgacgtacttgccggcattgcatacatcttcggtcgcgttgaggacgatggtcaagtcgggcgtgcagggcggaagaatcgtctttgtctcgagtttcctcggttacctggcattcgctggatatactggctactgcgggggaaagtttgctatcagaggcaagtccccgaacattcccctcatctgcagctacggtttcctcaaggtggctgatcaacaacctcgcacaacacgaatcgaacgataggtctggctgatgcgcttcggtccgaagtcctgctttacaaacgcacgcacgatctcaagattcacttgtatactccggcggggatcttgtcgcccgggtacgaagaggaggaaaagacgaaaccggccgtgacgaaaaagatcgaggaaggggatgtcccgatgttgccagaaaaatgtgtggaattgttattgagcggtgagtcggggacagaggacgactttccagccatggacatgatggctgatcgaattcctgtttacgtcaactcgcagggatggacaaggggtactatcagatcacgaatgatttcattactgacatcgtgcgggtccagactgccggaagcgtacctttcaacaactctttgtgggacatcgtcctgcatatcatcggattcgtgagttccgatggaaagctctccccgatacctgagaagatgcgctgatgcttggtttggggatactttagatcggcttgcccatcttccggatgatcgcagatagtaccgtcaaaaaacatgcgccccaacatatgaaagacgtccggatcaacgaggacgggctagagagtgacgcggatgaatagcgaaacgagattctataacgaccttctttgacttctttgacttgaccaacgacgtgcggctccccagtattgtggtctttcgttatgtcactgccgtcaaccatgtcagcagatggacctccgtgtcccctctttcgaacagaagatcaatcgaaatcgggggaaagtagacctcttccgatcagggcaaacatgcacaagctcatgacggtcgagagctttcactagtctggggattgcacatgacgtagagccaatgactacaacggaggctgacgtggtcctatacctcggtaacttctcagctcgaggtttagcagtggcgtgttcttggcagagacacgaagacgatgcggatgctgtgtattacgcctcatcttcaaacgctcggactatggacttggttaaagtcgcccgtatctcggatcagctgaaaaggccgtccttacaatctcgctcttatagagtacgatgcaccttgtaggggttccctgctggcagtttgagattcgacatggcgacatacgtcttaccggcttggctgacaaagtccaaagcaaatctggtcgctgcggatcgtcttcagagcccgtctacctgtgtataccaagcctgaagaccaaagacctcggcccgaacgggaatgatcagcatcggccatgccatgatatcggagtcagctcgcaatgcccgaaacggatgcaaaaacacgatacgaaggtacgagtatcggagtacggggatcgtgatgaggttcggagtccactggaattgacctgcgtgtaaatgcctgtggggctgggaatctagaccgagagcgaccgaacggtatacgaaatatgaaagaaaggccaacgaccaagcgatcgatgccgaaacagacgactgcgacttttgttgtctggccttgtgaagcgcgtcgtcgtatgccgctaaacgtctctcgcttccacgcgcccaccgcacttcgatctggggtcaagcgttcactcgcagccccctcgtgtcatgtctagccctagcgtggtcacatcagacgtcacacgactagcgtgttgcctatcgagaggcggccaaggatcacacgaccatcgaacaagacgaaacggggtgtgcgttgggctcggttttgataggcagccaaaggcttgggatggcccggtaatatcgccgcatgattcccagcgagggtcggtcaatttccgtttgcgagagtgacgagtcgcttgagatcagatataaccttcaaaccgtccacatcgtctttattgtcgaggctagatctcactcatgctcccatctatcggagtataattccaactagtcaccactcacgacgttcccccctgacgctattttcggggcatttcatcgaggcaccagacaagaaatcttccggatcagccagccagatcctctagatcgatcgcctgcccccgcacctttcccttcacggaaccatttttcagttgggtcgattcagcgaaatccaaccgcatgcagctgcagcagcaagccattccggattaagctcaaagacctaagacttctctcgaggacaaaagatgttgcccagaatctcgacgaacgatcgtagtgtaggttactcgaggtcggcagattaccccccgtccccccgcacaccaaccctctcatccacgctcagtcctcgtctaaaggctagtcgaggcagcggtcgttcacctgacatcagtccacaccgtctacctcctcgactcgatgtcgaccaggccggactagcattatctcctcctcaaatctacgccaacgggcatataatcctcaacgacgacgcagacgacgggtacctccaccaaaacagcgtcgagctcgacgaaaaataccgggacctcgtacataatcatcaaacccagctgagatcacattccgacggcagagccgcatcgcatgaacctgctagcccgtcaggacgctcgagcagacaagctgggaacagcccatcgagtctcggtttgaccatgccagattcaccagggaggaggagatcatacgcgggagcttggcagcagccctcaacaataggatcgtcacgcatgagtgcagaagatccggcgagtcatggtcgggtatcagaccgccgttcgggaatatcttcctctggcatgaggtctttcttggttaacccactagcgatccctacgagccatccatacctccgacttctctccacgctcgtcatctatggtctcacgttgacggtcgtttccagttggttaggcagcacgtcgacggtgacagaatcgggaatcctgcaacggatcaaggggaccagccaatcctccctatcggaccgcgagatcttgcgtttggccgaggaattacgattgtcgtcggtctttccgcttccacccagtcgacctgtcgataggtatggatcgagcaatcctgcataccgtgcgatgcacccgctagcacccccgccagctccttttccggctttgagggcgactcatttcttgccggaccggtgcctcgaaggatggttcgctcatggggagataatgtgctcgcgagccgagattggagaggaagaccaactgtaagccttccatgctgaccaggtctcggaattggcctattcacgcgagtaatatttgacatctcagggatgttacctggctctgggtcaatgggagcgatccacgatgggaggcccagatgatcgccgagcgcgaagccaaagggatcttctcgcccgctcatcactttcgggagaacaacgagctgatgtactcgatgcgaagcgtgctcgccaatatgcccggtcgattacggacgttccacctgatcaccgccgactatgcgtttgatactcggaccgacctcaagttgctacccaaatcacccgaagccctcagggagctcgagtcattggcggaacgacactacaagccggatacgatgtggaccaagtcgggcaaggccacggctgccgttcctggatcaggggtggaagcggaagatgatgatctcgaaccgcgagctggggaggccgaacaacgtagatcgcgatcaaccgccaggaagcctcaggtgatctcgggcagactttcaggctggttgaactcggcctggcgggtcgcacaagtaccgacctggctgaactttcagaaaatcgatttggccgatccgacgcacccattgcaccatctttatcaaaacccgagcctgcccaagaagcctcttacctctcacctgcatataacaacccacccgtccctacgatacgccgtgcactctgaaatcttccacctgccgacgcacaaaaagtcggtcacggagaaagccgtcacgggtctcggtgccatcgaatacaaggatggcgaatggcaaaagggcgcgttgccgactttcaactcgatggccattgagagcaggatcggttggctctggggactagccgacgtctcgttgtcgtttaacgacgactttttcatgctcaaaccgcatgctgtgtctgactggtggtctggactatacggtacggtgttgcgactggattacaattacaaccagcaggtccggcctctgctggacaaaaagttcctcaacaatgctggcgagaacggcgggctctatcatgccaactggctgcttagtcagaggtttccgaaacgcctgcggccgtactttgcgcacgttcccaaggtgatcaccaggggtctacatcatgaggcttcgatcatgttcgaggatgccatgacgagatcggcacagaggaaatttcgggaattggccgatggcgagggagacgttcagatgcaatggctcttgaccgcgctccgcatcgaacgatggagagaggccctattgtggacctgggcggtggcacgcgtcggaacccgaccagcttggggagagaacaagggcggcgagattggcatctggggggaagaggcgagggacgatatcaaggagctgtttggcgttaccgacgaggacgacgatgttatcgagatcgaggtcagccggggcgaacgatggaccatggagaaggaccggatggccgccaacttagaaggcgccggatgggagtcgcccaagaataccgagtttctgtggtgtaagtcgtcgtccttctcctttgcggcgggtcgcttcagtatctgacagtgtcgaccgtttcagcctcgatggatggtcatatcccgcccttgctcccacacggcgtccccaaggaaaacaacgacgtctgcaagattggcctggataggtgtctgggtcgcttctggtcggcaaacgagaacgtcacggcagacgacatgttcaagcggctggctttcagctaccctgcttgcggtgattgttgtaagtgtaccgccaacgcagacgcaggtatggctcgaaactgactcggcgttctagtcctcgtggcactggtcacctcgtctggtcctttgggcttgtctgccatcttccctctcgccgagatggtttacaagacccaggcgaatgacgacctcctccggacgatcgactacctacccccaccccaccttcccctgacgcctacctggcaagaagccgatttctcgctggaaagcgtcttgagcgagagtaccttgcccggcgagccgatcaaattgagacgatggtccatgcagctcttgtcgaggtacctgtacatgtcgggaaggacgcccagtcatttccacatggcgcggaatccggaccacgtcagaagcgtcttcaagtcggtcgatgacagcaaaaacgtgagtcggcagcaagcgcgccccgtactccggagtttcgatcatggttgctgatttgccgtgtcgcacgggggtaacataggtcgccttgttaggattcaatgacgacatcgacaaggactatgatgagacgcgacgactgatgatcgagtggttcgagcagaaatggccgatgccgtcggtctgggagaaaggttggaaaccggaccatcctcaacattagcaggaactagcactgaaacaggccagaagggcgagggattcgactccgacactgcacgtgcccgctttttgccaccttgagcataactagactttgacgttatcacctttacgaaacccctttatgactatacgattctcatacttatgtgatcctgttcaaccgatgccatgctcgttaggttggtggatggaattgttgttgttttttcgttcccgcggtgcgcgttcgagatcagtccgtcgacggcggtggatccttctggcaagcgcagtcgcgagtgggcggcaagacgtggcaacgcggaagcggattcgagggtgggaacagcaggcaggaagaagggggtacgtcatgctgggggcccggtagtggaggagtcatgggggaggaagcgtcctctagcaaactccacgtcggtaccggtaaccaggcttccgggtccggctcggcggggcaaaaggagaaacagggtcgcgagggtgtcaagggttccggatccggatccggatcgggtgagaagaggacgaggcacaagctgcccagaggggtcgtcaagggcaaagatgtcgaacaagatgtgagtccaccccccctccccctggcttgccgaggttgtgcctaccatcccgacgacccggtccacctgttcctctcgctgacccttcatccgtcctcacgcggatacagccggatcgatggttgcccctccaacaacgacgttcgtatcaagcccaactcgctcaaaacccgtcgagcgggcaacacaagaagaaacgggccaatcataaacagtcggccccggggagagaagtttctgggctgggcactcaggggagtacgagcgaagatgttagagtaggaggtggtccgaccgcgggcggagccggcgggggcgccaaggggaaaaagggaagaaagggtcgataggcaaccatgaatctccagactatgccagagacctaaagctcaatcgttgtttgaggggtgcacctcgccgtgtcgccctttattgccgctctacttggcccaggcgcttgactatacattgatggtccccgtttatatgcgtctggcgcgatacaatccttactgatacgagatacagtgaatacattttgctcatctaccaaccggtcaatacggcctgagcatagccttctgctaggcgcaacttgtgatactctgcgactgttttgcacgattggatcagcctcgaggaaatacgtcaggacgtgcgatgcgtggcgtgacgtactgctgacaatgctcttcagccgcttcttcatttcataacgtcctgcggtctcgcggaaagatccgccacagctgcaagttggcgagagattctcgcttttgatttgactgcatttttgacaagcgagctgagtgtaagagcagagtcagtcacccgttgacgagagcgtggatcgcccgcaagaaaaagtcttccaactcacatcctggagctgataattcgtttgaagcctattgaccagctcgatgagagggatctccacgctcgatctatcatactcgcccaggcatacctacgttatcggcagattgaatctgtcagcgcatgtttggttgacgagctggaggagtcagagacgacttactgtacatgcccaggatgatcgtcgcggcggaagaatcgtcctccccttcgatgccgggtcgacgatcggcaatctgtccggatcgcgacataaatcgacgtcccgatgagagaagcagtggtcgcagatgaccatcggtaagatcaacggttgacagggattacggaaagcagcttcttcggaaaactctcgaatgttgcacagatccagcaggtttctcttcaaaatttgaacctcgatcttcagctccgaagccaaggagaagaccgcgcagatcgtcttgacaaactcgaggcttggattggtaggcgcagcgacgccacctggtaaaacgggaaaggcgagcaactcggcttcctctggatctgtcgccgctgccgcttgccgcttgcggatcttggacacgaccgagagcaactttctcgttaattgctgggacacgctggtctgagcggccacaagttccttgaccttagctttgctcagctgagtcggcggcgcgacgcccccattgaccggcatgttcaggtcgtgaatcatcttgaggggagttctgccatccgaagacttttgcttcgcgctatacatcgcccagatgaaattaccgacttgcgcctcaaagtaatgttggatacctggaggaaggtatgcttgaacgttccaatccatggtgatcgtgcattcgtccgaagcattcgatatgctggccgtctccgcggcgaccttgacccctccaaagtttgcaatgtccatccaggcgaggtagttccaaaactgcgtaatctgaaacgagatgtcctggaacagcggctgggagtttgcagcggtgacaaggtattgcgcaaaggcaaaggcactgcccgcgtccggcttcgatgtcaggaggaacagtctgccaaagtccgcatagacgacttgagcaccaagacgcttgaactcgcttagcagctgcaggtagaccttgcgcatcaatccgtgcaggaagcgttgcaatgcaggatcatacatcgctgccgagctagagcttagccacctccagaaatggttgactaccaattcgggcgcgcgagcgctgcgacctttcgctcgtgcgcgtgcatgatccgtccaccacgaccgtaccatagctttgaggaccgagaaagtctgcgtgggtaagacagcatctccaagcatcgctgctgtatgagcagaccccttggcatattcatccaagttatgcgaagccgaatcgaaagccatggaacctgttccactaccctccatctcgttgacgatagcggattgcaggatggaattgattgccagatcgaccatgttgatctccaagacggcgttggagtaacagcctggcatcgaagtgcgaggcaccacgagctcttcgccccctttggagtcttgttcgtgccctcccagatcaggatgaggttcttccgaccaccacatgaccatgtcctgcttgtgaagccggcgcgcaaagtctaggtctgcgacaaatagggcgacgtccgcaggcagattctacaagggggattgaaacccgtcagcgcggataatttagtgatgcgcaaaactcactcacacccagaggtacgtcatagtgggatgccaattcaatttgagatgccaaccacgatccaatgcctaggtagtctcgtaccacggcctttgtggcggtgactagccacatcaacgggctagcatcgttttcggacggctgaccggcggtgatgatgggaaagtcagaaaagatcgatgccttgaccaaaaagtgatccttttctagcggagatcggaggacaatcatgttgggtccccgtcgattattcgccaattccttggaaattgctttgagcgcagcggattcgttggtaaagtacgccacagaatgcccaaaagtaacaggatagtcaaggaggctcgtagcgatctcggcttccgtcatcttcgcatattcgtcggcgtagagattctttggactgggaagctggggtcgatttcgcgccgcatcgacaatgtaaaacttggcctcttgtcctggggcgcatatggtgaacatttgccgagggcctgaagaagaatggtgaaggtagatgtatcgcatgcccttgccgtcgttcagatagcggtgtttcgtaatcgagactccagccgattccaaatctcctatgtcgaaacctttatccaagccgcgactcaagcctccgccggactctgaagtcagtcgacacgaagacccaaattgcagaagtgcacggaccgcgagaggtacgtgaagctcataagcaccgtcgacgtttgggttattgatgagactcgagaaatggtcttccccttcaacgtaaatgtgttcatccaccgtcaccttgaaaagatgtcgacatgaatgaccccggggcaaagtccgcacgatcggcacagcctggtaccgggagtcaaaagtgtcttccgcaggcgcctttttgagattcagataaaattctctaggaacgcgaagccgcaggctttggaaagtcgagttgattgcgagccacaatttgaattccccgggtcgattggtcggggcaatctgcacgacatcccattggctacccgacataccaaacgactgattctgcaacatagctgcgatagatccgttgccctttgaaacagcagtacccaacgtcaactgcccggtgctcttgccctgttgtcgcttccgcctccaaatgcgtcgcgtcgcgcggagccagcccgagtagtcttccatcggatcaggagggatttcggacacctggtcgtcatcgttggccggcctcttctttctagtcacagccgttcgtcgacggccataaaggctgaaggcttcctttgtcgcgccgaagtcttccatgtcaacagacgtcttgctggcttcgggcacgatggccttcttgaacatgtccgtcaatttgtgctgctggaacttgtctgcctttgccatgactcgcttgtgtagccagtcgggatgtcgcacccttggaacaggattcggaacccgctgcagagctgccggaatcgtgatcagcttctgaataaccgatcccaagcgttcttcgtaatatgtccaatccagaatggagcgtaactcgaattcgatcaaactgttatctttaagccacttgcgcaagaagtggcgcttgacgccttcttccgcctcaaagatggcaactggaaccgcgcgctctgtcactggcgctccaagcggcttggccgaaataatgaacttgcacgctaaacccttgtccttgaccatctgctcgcccaggaactcggccaatcgacgggcggtactgatggacgtagacttttgaccagcgtattcggccaaagtcttgctcatgctcctgttctcagcaatgagatccagtagttcctcatcgctcaagctggacgctcgactctgaaggatatccaaccactgatcagcgacctctgcaacagcagcataacactcttctgtcgtggttcccagcagaaacttgtcaaagatttgcgattggaaaatcttgatcatctgaagctctccccttcgtttgacttcaaagcccttgagctcggccaacgaattgtcgtggttgtatactgcgtatcgcttcttcagcagcttgtcttcttcttttgacgacggcaaaatcatggccttgtatggcccatccaattcaaagaagatactgttctcgtttcgaatttcgtagagccccgactccttgtcaatgaggtcgtggtaggcgtcattggtgaattgcgcgtgaaccaaatgattgagcattgtgcaggggtaagagattctgaatttcttcccgctcttcagcttgaaatcgaaatcttccggaaacacccctggcagcatgcaccagattccatccgtatcgagctccagaggtcgcccgatctgttcgacgagctgtcgggccatttggatgattttggctccagtaaggcaagtaataccagccatttccatggagtaccatcgcgcaccctttcgcatgacgtagccgtagaacgagttcaagatgcacttgtgagccagctgaagagaatcgtacaggacgatcatctgtttcgcttcctcgacctctgtcagcgatttattttccgatacgacctggtccaagttctttttccaggttttgtgcagtcccttgtattcgtatctcctatcacggaatgctcgaacagtgtcgatgtagaagggattttctcgctggcaaatgatggcttctcggttgacgatctccgtttcgtgcgtctttttatagacctttctggagtaatcgccaagccgtttatgcacgagcgcagattgctcgcttggtggtagttcgttgaaacgacgcttcggggcccatgaaactttgccgggaaagtcctcctgctccaatgcatggcggatcatgttgacctcgtctcgcttcgctggaaagtaatctcctctccaagaccactccattttcctgtcgcacttcttgtcggctcgattgtagtcacaaaccgcgcaagtcgcggcatccttgactgcgtctggttgaagacgattcgacaacatgatgttagggtacatggcggccacatccagatgatagattagaggcttgtcgaaccgattggggttatctcgcatgagctctagtgcggtttgtatcttgtccttgacttcatcgtagtcttctacgtcttcgagggcaatattaccttcctcgcgcaaactaaacttgagtgcatgatctagatcgtcgatgagctgcaagattgactgaatgaggatgcaaccggttgggagatcgcgcaaaacatgctcaccccctgtatagcctcgggcacgaccttgaattgggttgggatatcgcttcggaacactccggcctccaaagcttctacatgtcctccaacataggtctcggcggccaagacatggccttggtatgtagttccatgtgcgtcctcgtgacggttaggcatgatgatatcgccttgatatgcttcaacctgaagaagatccgatgtcagcgcatcaaatccaggtgggtgaagaagcaggacgtaccatcaagagcgtctcgcaaagagttccactacccttgcgcaacacctcgtcgggatttaggggaataatgttgcaaagcgaaaagacgaaagggtgcacatatttcatgtacaggtagtacgtcgccacggcatccgaaacggagtactgcgcaagaatgtgtggccgctccatcgcataactggtacatgatccagaataagacgagatgtctctcaggcgcaagggagatacttacggagtcatgagttctgggtccaattcggccggattgtaacccagtttggccttcgtgacagcctttagattttgacttccttggggtagatacgagtcccgcttcacccaactggggatcggggcgagtcatggtaagcgccttcttcgatgtgtcttttcatgctagtgctcaccggaaacaatccatatgcgcgcaggtcctgctcttgaactcctcctcgttatccctcttgaaaccaatctcggcgtacatgttgatgccatgaatcaacgccctggcctccacgaacgggaaatcgaacgaatctccgttataggtcgccatgacggtaggtttggcatcctgaatgtgctcaaaccatcttcgtattacagcagcctattcgtacaagccggtcagcatgctcgacctaggggatccgtaccatcgagactgacctcgtccggttcgttgaaaatggtgaaatctccaggatattcatcttttggcgtgtattcgaaatcttcgatgtcttcgctcacaatctccctatttgtaatcaagtagccaactccatcgatcatgtatgaaatcatcatgatctgatcggtttgttgatccgggaacttgagaggctgttttgacgtctcgatatcataggccatgacgactggctcggctcgcttgaccctcgaggtcagccgggtaagcttcgtgttgccgccttgcgaatggatagtgtaccacagaccgacacgaacgtctgcgatggagccatcatcagcggacgtcaggtggtagcatgttccacgaaggcacgacttaccaagatcgatcgctactcggagatagtaggcgatatcgtgttcccgtagatcgacgatacaatcctgtggatcccgatctttacccttgcctttgcctgctccattagattcggctccccatgctgccctggctccggacttcgagctctccccggcattgtcgtactcgtcgtcgtaaccgtatccgacatccatagccgccccgaacccattgccttgcgcgtcggcgctgaccacttcagcatacgcatcgattgcattgagcttggcgctgttggcagtggcgaggggaaggagatctctccggaccatctgtaggtcttgggtgttgtggaaaaagatcttgacgaagactggcggtgccgagagcaagtggtttggctgtagtcgattcagtgccggatggtgagctgtaggcggcgtgatgattatttctgacattcggcttaccagactcaagtcccacttctttctccgttcggtacgaacgaccagaccttcatacttctttaccagccactcttcgacttgagtttctgatccggccctgcaaccgacaaaaaagtacggttcaaatgggaccgtcgctttaaagctaccaccatcgtcctggatgaagtaaaagtcgaccgctgcctttcctcctacgtggctatctgactttatcagagtctgaggcgagcaacaagatgaataagcaattccgcccatgattggaccaagatcgccgatcgtacctgatgcatattcacgagccatccctccttttcctctccctgagctttcccgctctcgaaccgccagaaccctaagcgttcgtcgatctcctcgtaaatcttgatctcttcaaacctttcctgggctgctgtcccatcgtcttctcgtttcaggggattgccatccttgccacctctggccccgccacctcttcctggtcgtcgactgacatatcgggtattgctgcctctcgatccccctccacgagactttcctcgtccgccactggtcaacccaaaaatgggatttccaggccgtcccatagtgctcgatagatgattctatagtgttttgtacaggtattatcgaattgaagaggcaaacgcttgacaatcaaagaagcatgcacatcatctcatcatcgaaagcaacaacctctggaatcaacaacgaagagagcccgggcgaccaaaggatcgcgaacgcgcctctttcgacgcgtttgacgttttaatgagcgacgcgttcaagggaaaagatgaatggtctccacatatcgaatatgcattccaacttctgatgcgagggggtattgaaaaagtacaatttcgtatcatctccctagtcgttgctctacacctagccaccgtctcatagcttgatcccactcgtccgtactggccatgatccgctttggccgagaatcgctgggtaaccaaaatcgtcgagaccgatcagtgatacaattccgaccctaatatcgcgatccgagacgcactagatttcggttatccgtagcatccagaacgggtatccatgtatttcaagaggatgacggggaaagagactggccaaggccttgtgtcgccagccacgtgcggtattcgaactttggttgcggtcaacatcagagggtctgactttagcggaaccgggcatatgatgcactaccagtagttctgggtctgaatgaaaatgtagagcatctgtacgtgaaggccgaatctgatttcagtaccagcagtctctactgcgtgctcgttgcacagacttacctcggatcatgtcatcgacatgctcgatcgtgatctcttccagtgtaatgtcctttgcaaccaagtctttcgtcatatcggcaagcagatcttccgatgtccgactgggcaagatgtgcacagataaaggcttcaggcgcagcttctgaccgactatggggtggagacgagagagagttggccgtcagctcggttcagccgacgatgatgtccggtatgttggtcccactctgagcgtcctttaacatctcctccatatcaggccatacggtatagctctgtgtctcttgtcggcggaaagactgttcgctgtcccccatactagaaccgttcgctgtcgagctcgaagcgccggatgtcgttggtggtacatcatgcgaatagcgtggaggtgaacatgttcccgacgccggtggggtaggtggagagggtacgaggatagaaagaaggccgggcaacaccatttcaagaagccctaaggtgttcagaaggataaaggtatgtatattagacagatgaaaaggacgctgcccgatgccatctgctcaccgtcctcgttccacagactgatctcgtccactccattttgcaaagcccaggcgacaacctgtctaactgtctccaggataagatcctcgtctgccgtccgttgaatgtcctcggccttttcctttcctttgcgcgacctggctcttcgagaagagtctatcggtcgatcaccattctctgcggctcttgaagatgccgcctttcgcccaagtgatgtcacgatcgaaaaggcaacatgtctcggacacttctgagcttttcgagaggttgatgctgtggtgattcgactggtccgagctgttattgccgagacttgtagaaccacgagatgtgctgcatgaatgccgacgaggagcggtgtgaaagctagacggcgcagtgagtccatcgcgaagcaccaagactggcggacggtcacgaagcctaggctgatggacgcagaagcagtgtattagaatataatctcaaccggctaaacgaggaaaggatgccatgctacatgctgcgactttcagctgtcgtcgacatttgtgagatgctagacgcaagccgagagagccatgcgagccaaagagcggtcaagtgcgcgtcgccggggtcccccgcagtcgcctggttcacctgatttcgtgcgacacgctctacaggttcatacgacgagatcgatcatacatgcatgcggtaggttgtcgaatcgatactactagatacagctggttagagattcttgctgaagccggaattcttccgacgtgtgtgctacggtgatacagcgagtccttacagaaatgggttcccaacgatcaccttgccgagcttagaaaggtggtgcgattggaaacaggcggatgtcgaaattctatcgtcctgacgacatgctctaatcggtatccatgctgcgtcggacgggatcttcctccaacgaagtttcgttcgacagaccgctggacgtccgatgagtctcttcaccctcgaccttcatcggaggtccacgagtaatcttgatactgggtcgtttgtgcagagacgggccgctcaacgacgtaggtgaagctcgcctcttgatgtgggattcttcatccgtgttggtccccgagccgagtcctcggccttcgtgcatggctgcaacctcggcctcggcttctttctcctcatccagaatgtccaagaaaccgtagataatggctgcgtcgcggaatttgtcagtacggcttggggatctttcggcagaactcgcgatcgaacacacctcggtaaacaaaagcatattgcctaagactttgcacgagactcatgcgctggactctcatacccccaagtacgctttggactggacggtccatttcggagatcgagttaacctcgccatcattttggtgttctcccgtgatcaacgggatgaaagccatctcgctgcaaagacaccatacacattagctgtcctgtctgtcaaattaaggcactgcagtcgcgcaaaacttacccctcaatcgcgtctggcgtacgggctttcgcttgatctcccttgctctcgaaactaaagctctgtccaaagcttggcctttcagagctcattgtttcgggagacgccatcctcgctggttcaggtgatttctcaaagacagcggtgtctttgttcggcgaagctaggttgagcaagtggctagaagccaatcgatgcaggctcgagtttgactggtacgatgctagtggcgagtcgccattgagcgaagaagccgacgatggtcgcctctcctcgacgccgccgtcactaggaacgccacccttgcgtccgcgagcgctggagtaggaaccacgaattttgcgatgctgtcgctgatgttcgcgtcgcaaaccatccaagatagagtccacgaccatgaagctccctgtacgaccgacaccagccgagcctgtaaatgtgtcaacagccgtgagctcgtattcacgtggcgaaagtagacagacgcaagccacgtacagtgcacaagcacgggggccttgcgcgattgctcatctttttcttctggcaaatcgacggcggctttgtcaacctctttgaccaaaccgagcaatagcctgggatcctccggaacgtcaaagtcgggccaagccacacattgcagctgtatgatcttgcggggtttctcttcgggatgtttggaatgcgaaagcaagaacgtccgcttgatgttcggagcctcggatgaaggtccagcgttgccaccgacgtggaagttaaaaccagaaacatctttctcagcggtatcttcacctccttcagtcgagacatgctcgaggtggaagggtccgtattgtccggccgtccagtaggctccgcacttgcacgcgcctccctcgaactgctttgtcaacctgtacatgttgaaaatatcaggatcagccgagcgactctcgaagcaggattgaatttcgatgacctacatgacgatgacgtggacctgctgttcccacaccaatgtccagaaatctctaaaggtcgcatccaaaggtccttgcgtcgcgatatacctcttcgtagtaccttgcggttgtatgaagtttgcgttgatatagtcggaaccatcgtcgtaacacttctccttgagtcgaacacgagagaaatcataaggccagatattcttgtacctggtatgaggtcaataaagctaaaattagcgcggcacccaagcgagacgtggtgctaatgagcttaccggttcttcgatcctcgctcgacaccggctgtgatcgagaatggaaaataatcgtcccgttcgtgtttgtccatgtcggactgagtctgggtcgttcggatgtatccggtactagcgagtcgtttgagattgcctggaaccattgtcgtccgagtttctgcgaggcgagtaccgcgagaatgccactccatgatgccctgcagtcgcttttgttcgtctcgctccaccctctcgaattctttcgcaagctgttcagcaacttccggggaaggacgcgccagcatgtctcgcaaaaagtcgggcaattcattggctcgagccttgatgtcgtcaggcaattcgagcgggatgcgttccagaatgccaccgtgggcgagttccaggttctgacggatattgtcaaagaaggggtttgcgggttgcagcttttgcttttccgtcacttgcgcccgaccgggagtcggtcggggaccggatcgtggcgaggtggtgccggatctttgattttccgaagtcggtccgtcggtttcgttctgcagcactcgggcgggatcaccgctggattgcagatttggcttagcagccgggctgttgggcagggtaagcgacttgggagcattggctcgtcgtgttcccactccggaggcagaggctatggaagaaaccggacgatcgcataagcagagaacaatcgaatgatcagagaaggcgaaagcgtacccgaagagaatgccatccgatcgagtcttccgatcattcttccgggctgaccagtcggacttcctgggctgttcggaccctgcgcttgcgggtccgtctcgtcctcggatgattctggttgaccgtgctcgagcgccacaccttcaaggtccgagcaagccgccatgccccccttgacaaagtacacgtgaccctgtttcgcgtccgattcggcgtcggtcatggcgttgccaaacttgctcgccagtccaacaatgacgcttccaggtgcggccatcggagagtcttgatcgacgatgacaatctcctctgccgccttgaaatcggtaatcgcgttggctgcccgcggggacaacatttgcgccagcttttcgaccgagaatgccgggcgcttcaaaagtgtcgaaggcactggcagcgacaacgccccgggaagatgagattgaacgtaactcgagggtggtcgaagatctaggatcaagacttcgccttcgggtcgacccaacatggacgagagctgactgggtaaaagagcttgaggtacagtcgtgttgctctttccagtcgcagggccacttggttttgagagactagtcccgggcgttgaagatgtcgatgtcggcgccgaggctccgccgagacgcccagcaataccaggaggcaggttgagcttcatgggcgctccaccagcgttgactcggcctggcccggcaagtggccctccgaatgccgctggcggtttgacggcttctgcctgtccttccatctcattgggcaccgattcgacgctcgtgctctgactcaacccgctcggtccgctcttgcttccccttcgtttagccaacttggcagccaacgagtccagccccaggccagtacccgattcccgtcctccttggggtctagccgaagccgaagctggagcaggtagactcgagaacggatcggccatgttgctcgtccccaacccgggagtctgggccgtcatcccgcttcccgaaaacgctcctggccaaccagttggcggagacttggatgtcccggctgcacctccacccaggttgagtaattcgaacggagcgccgaggtggggcgatatactcctcccctgcccagattgcgatcccgggtggacaaactgattgaccccggacggcggtccgaaaggactgttgatgggtcctcccggtccttccagactcggcgtcgggactcccgacgtagccgcgaggtgcgcccatggggaattagcaggcactccagcaaagggagattgcatgggcatgttcattgtcaacggtggcgaggtcgatccgttcagcgggggcgaggtcactcctgtcgtgacgggggtatcgggtacgcctggtcgagaatcccgatgagcggtgaacgaggacccgtgagggctagccgaacccaggttgcccagtgacatcttgcccgacatcctcctcgccagtccggacgtcggggttgaccccataccggctccactccgcacagctgacgatccgagttgtatgggcttttgtggagtcgtcatcggattgcttgcgtctccggatctcgcgcccgtgatcgagtctgatgaacccgaggccgatgcttgggtagacgattcgaatggacgatggttagtaggtggcatcgaggggaaaccgaaaccgtcctgagcttgagattgcgattccagggagaaaggttgagcagaatcagtctgacgtgcctggtcagaccatggtccagcattcgcgttgtcgtccgggtcgtccatattcacgtcggacaacatgatcggcaacagagagcggtgatagcggggaagagcgagagcctagtgaactgattgcgagtggtgagtcccgcgatgttgctggcaaaccagtctattagagtttcgcctaggcgtggcgagggttctcgacagtctctaatttgaatcggggctgtcgttcacgtcaagagatggtggatggctctaggatgacagtgcgctggaatgcacctctctatgctttgattcttcgttcaaatgtacgttccagtaatgccgattcaatccgatcaatttaaaactgctaatcgtccgttccctatgtcgttacttcgtgtatgttagtcagacgagagggatggtgttggcggagaggcgaacaagcaggtcgagaagttcaaggtggtagtcgagagccgaggagtaccgaaaggatctggcgatctcaccgagcagaggtcttccgtatcggtggaggaggggtgactgactctaggtgacacctggttcggacgagggcagcaggtggatgacgctgcgtaaaccttgctgagatggacgttcagtagagatcgccctcaggtgtttcgaagacggcgatcggagagtttggcgagatcgtgatgtcgatggatgcccaaggatgagtatcgtcggaaatctgtcgactctatgcactagcaggcaggtgggtcgtatggagcgagtcgacacgagccaactaacgggattcaagatgctgaagcgaattagaatggatctctcttgcgagcgggggagacgtgttgcggatgcgggggagaggaccaggcctggaaggcgagagggagcaagacaggcagggccgaagaggatacgcgaaacgggagtcaagcgcggaaaatgcaggatatgatgcacaaatggtgatgatgcgacgatgatgatggggagcatggctgggccgtaaaatcgggcaaagtgccgatcatctgggaccgaagtgcggctctggccctcgacttttttacacccgctcgcaccttttctcgactctgcacatacccacaaccacgctcagcccaggatctggtcgtcgaccattccatccagaccaactcctaacagcatgccatcaccttgcgatctcgtcgatctgagcacctccctcgatcgacgttcgaccttttgcaccgggcatcaatcctcgtccctcgcctagaattgcaaaaaggctcagcggccggggagcgcgtgttgttgccctttcttttccatgacgacgatgacgacgatttctacctcgcgtgccatgttgcccctttgctagcatcaaggacaacacgtgaaacttgacatcattcgcgaaacctcaacggggctttcagctttcagcccacagctcggcgccgagtgatgatcgacccgtttcgatgctagaaagggcaagaccgtcagacccatgtcattgcgtttcgttccacacagcgtgcgaccgagcagttgagcagccccacggagcgaggacgatcgtggatccctttgatgattctgggcggccgttacggtcagtcgcgaccgtcgaaagacagctcaaataggagatcggcgctagggctgtggctatgaaaggctgatgcaaggcttcactagacttcatcactctcttgcgctctgtgcttaggaggatcagtgttgttgtgttgttcctgaaacatgccaaggaagacttgctctaactcctatcgaatgtgaggaaatcgacctgcgccgacagagcgacctccctcgccctgcttttgttccggcgataatgagacgagtcttcttggacgaccggctatgggggaaacaggccagagaaaggtcttcctcaaaggttctggccgtgagggtatagggctcatccatgtggatcgatccccagccattgccgttgttggccaatctgggagagcctgtcggaaggagcaaagacctgcagctcgactctcatgaccctcatctcctttcaaattgatccgcaggttcgctcgacctgcatcatgtccgcttggcctaaagcttccacgtcatgcaagactgagcaaccactgtgtgtctttcgtattctcaggcgtggaatgatgaatattttcatgacaataccgccctaccgacacatccaacgagactaatttttacgtagacgatcgttattcgaactgtttttgcttggctcatgctgccctatacccgacaggcccgtatcccgcctagtcgaccttggcaaggaccaagacgaccctcgaggggatgtacgcttgcaggtagtttctcctcccgttccactccatgtcggtcgtaaagtattccgacccggcgtctacacgctcgtgacctccgaaccgcttctcgtccgagttcaggacgatcttgtacttgcccggaacatctacaccgacgcggtagtcgacaaaggattccttgtagtggactgcaaaggaggacacaggtgcgatcagttccgatgaccttatggcgatcaagatttggtcgacgacctacagttgaagatgaagagcaaaccggcgcgctcaaagaccagcatcttgtccccctcgtgcttgagcgatacgtatgcctaggtaacaaaagtatcgatcagctaatgccttgctccgtttcgttgcaacctcgactcacctgaggcgcgctcaaccacttgtacttggtctcgaggttgttcatggccatgtcaaagtcgtagaggtacctgtacctcaacaacttgtcgtcgaccaagttgaactgtcgtctggcgtgctggaaagagttgccgttgccctcacgaggaaagtccatccattccgggtgtccaaactcgttgccctcaaagttgaggtatccctcgcctccgagcgagtgaacgacgagtcggatcatcttgtgcaaggcgatacctcggtcgacgacgggcgtcagttcgctcaggtcggacatgttggtgtctgtgcgagtcaaatttgggccagattcagcgcggtgaccggtcgtatttcctgccggcatagacctacacatctcggcgtccatcatccagaatgccaacgtcttgtcacctaccagggcctggtcgtgactctcagcatacgcgatactcttctccgcatgacgcctgttcgtgagggtgtgcgagatgttgccaatctcccactgctcgtcggtcgactccttcaacagcttgatccacatgtccggaatggccatcgaaagtcggtagtcgaacccgacaccgccctcggagacgggtcgacagagcgtgggcatacccgagacgtcctcggcgatggtgatcacgttggggtagagcttgtgcaagagctcgttggcctatcaatttcgcatggcgatactgttagctctttctgagttgttgacctgatctcgacgggggctactcacgagcatcaagtagaccatggcctccatgtcgacgtcatcaccaaagtactcgtggtatccgcccgagaacccaacacccatcccgtggtgcttgtacatcatgctcgtaacaccgtcaaacctgaatccatcgaactggtactcttccatgtagaacctcaggttggagaggaggaatcgcaagacttcgtggctaccatagttgaagagacggctatgattgcaggaatgcaaaagccgctgtgtcaatagtcatcgacttgcaagcagtagagggcaaagacgtacgaatcccaaagatcatgtcgacctcgacccccttcgtggaagtaacagtcgtcggttccgtcaaagtagttcaatctgtcaccgacacaacggatcaatcgcgtgtccattgtcgtatcacttcctgaagctggactgacccatcctcggtgttcttggaagcgtgcgagtggacgacgtcgagcaagacgatcaagcccatcccgtgcgcagcatcgatcaacgacttcaaatcctcgggagtgcctatccgacgaaaaagctcagtccagctcgtccatttctgagacaagcaagcgaggccgcttaccgtatcgcgaagacgctgcaaagaacgagttgacctggtatccgaaggctgtgcgtacgagacgagactatcaatgcctcgtccgattcgactggtctttggggtccagcgacttacaagcgtagtatgcgtgctccataacagccatcctatcgaagagttcatgagccagaatcccgatgagggagtcgcgcaaggcaaaaagctcgttgtgattgtggttgagagcagcacttacatctggatacagttgtacccgagctccttgatcctgggcaacaagttcttctcaaactctttgtacgacccgaccttgggctctggggtagaaattccaactatgaccgatcagaggatgaggacatatcagtgctcgtccacgattcgtcaaaggcacaataggacgatccggcgcgggactgaccatgggcttcgtaaatcttcaacccgccatccggggtgacctctacgggacaaggacgctggttcttgaacgtgtacctctcctccttaggcgggttccagaacctggcatcgtacacgggggaaacgttgaggtcctgagtgacccgttggatccagggagggagacggtcgatggtcgatccgtcaggtttggtaaacgagacctgcgacgaaaggatagattcgagatgattagggatccttattcaccccgggtaattgtctgtcagaaggtcgctactgaccttgatcatcgagtcgtgggggatcgcacatgacccgtccgacttgggctcgacgtaacattcccaaacgccgaaatcgtcccgcttcatagggttggccgagtgatcccagttatctatcagagcggataagatgcgtattagtatccatcgggccggtggtcaagggaagtgcgggggacgagctcggcagactcactgaaatcaccgatcaacctggcctccttgacgcctggcgcccactcggtgtacctcaccccgttcttctcatcaacgataaatcccctcttctcatatcccttggagaactcgtccaacccgccctcgttatcaaggatggactgggcttgttcacggtagaggtcgtaccggtacttgatgttgcctttgtacggctcgagcctaggtgcacgtcggaagtcaaaggaaaggtggtcgaggtcagcttctgtaagattcttgtcgccttccatacaggcaaacttcatctgaactcaccaagggtcgaggacgacgacggcagtgcctaaccaaccgatcaaagcgctcagtccatcgtcgcatagacagggggaaactgccggcggcagaagatctcgcgccgtcgacttgcacaaaggctactcaccgtcggtaggcaagttctggtcgtttgacatggtttttgcgggttacttattagtgaattgtctctagacggtagacaaggcactgatatgatatcgaggtcaaaggatcacagggatataggggtcgatggtatggtcttacattccaacatccccatcgaccagcggagcagctcttacttggagccgtggtggtggtggtggtgatggtggttggtcggttgatgacgcggggcaaagcagagcaaccgaaccgaaccgaaccgaaccgagagccgtggggcagaggaaggggaaggggaatggaggaggacatgggggcgtgagcgtgtgatctgcatccgacaagctagtggggtgagcggacaacagtatcacgtgagtccgattggcaggcccggaagctctctggtcgcgcttgtagaaatactagtagatgatcacccaaccgacgaaacagcggagcgaaacgtaaaggagaggttcagtctctttgtgtcgggccgatatgaaacttcgttctcaaatcgagccgagctgatataatcagtactcttcgttagacgtcactttgtggtcccgcaagcctgtacagagaccgctccatgtgtcacttgacttcttcgcctactcaatatgggggccgtccttcatgtccttgggagaatgagccaatgagccatcatcaaatcagctaggaacaaacaggagcaaggagcggacgatcgcagtccagtctggacatcaaaactccccatccaatatcgatcaacctcaacttccggcctggaacaatgtctcacaatgcattagcatcaaatctagccaaacaaatcttccatgactaatccaacaaaccccacccattatcaaaaccagaacacgtcttccacctcttctaccaccgctcctgtcacctactctgctgtcatccaaggcaaaaccgctgacaatccgacccgtcccgtctccctggtcccataatcgatccatctcgactggttctaagacccccggtccgactggtctcaacaagaccggcaggttcgatccgggttggtatcatactggatcgccgaccgacatcgggtgcggggtaagtacgagcactttcgttcacctctccgtcccctgtcccccgctcgtccacctcggcgtgggtttcgagaccgtatcgacgctcgtccttggtggcaaacaccgatcacaaagtccgattgcatgtcgaacagacaggcgagggctgaaaaggcacttagacatgcagctttgcgattcacgtcgagcctaggcattgaagggcatgtgagatggtgagaaaggtccgtctctcaccggtcagacgactccagacctgcagcgacgacgtaccatgcatgtcgctcttacgagccgaacccgaagcccctgtcatcgagactgatgtctcgaaatggagctcatgggtcatgtgtacggaaaatggtatgctagagcgccaggatttacttcgaggcgaaaaacaacggaaaaatggacaacaaagagggataatatggcacgcgacacgattgaatggtatggaccttgtcgaccagagcgttcgcgcttgttactcctcgatctgcgtgcaacgtcgaatcagcccggctctgcccgtcttgttcgtaaacccggacactcacgtcactctcggcgctgacgctgactccacctttggtcttcttgttgacgctgccgttcctagccaacccgctcttctcgtcgaatggagcttcgccgcccgaaacgtccttgacattgaccttgtatccttgctcggccccgatggcggatcgggtccagaagacgagggactcgaggacggtcgggttggacgcagtggacgagaggataggggtgatgttcaagtgactgcgatgcgagggttcatgtgtcagactcagatcgaccatgaaagaaacatgtacgagccgactgacgagtagtcctcgctgaacacaccgaacaaccatcgctggtagtcggtaaacacaaagtacctgcatcccaacctcctggaagccttgcagtttcgagagtggtaccaggaagccttgttcttgatgttgtagtggtatgggccctgtgacgatcgatcacgctctttaagttagcaccactgctctgacacccgaagagatggcaaaactcgcctcgtaaacatattcgtcccaatcagcagatgagaacgccgacgagttgatcgtcctgacgactaggtggaccttttcggggttcttctcgtcgatcaacaagaactctccggaacctgtaaagcgtgtcaaatcggtgtgcatgggcggtggagcaagctgatcagttccaggtgctagccgctttcgaggttcccggtgaccaggagaccgcaatggcacttaccaagaggactcttgttgaacttccaaccccagctaggtccagggacatcgaccttgttctcctccttgccggcatcaccctcctcttcggcgtgagcagcctctccgccctgaggggtaacctcctctccaccgtcgctctcgtatccggcagcatcaatgcgtcgggtcgaggtggacaatgcggcaaagtcagttccctgttcggacccagagagggcgcagagggtggcggcagttgcggcgagggggagttgacgaaggtctaggaacgcacgtgtacgatggtcagccccagcgttgaagcgaggctagagtcttcgggggacacatggaaactcacactgctgtacgtcctgagcggacttgacctccttggggagcttgggaaggacagtcaagaaatgagggaagggatgggtgggatgagcggcgataggcttctcgggcaaagtcttgacgtctgtccacgccaaatgtggcacgagcagcagaatatcagtgatcccgatccgttccatcgcatcgtgcagtcttcgggcttacaagaggtgaccagcgacttgaagtcgttgacgagcgagacaccagtcaagactccgtcgtaaggtttcctctccccggttgctccacctccagcggggaagttctccctgacattgggtagctgagcagagaggtacttgtcgagaggaagagcgggttgaggcataatgtaggtcgttcgagtgtttcgtgatatagaatttcgggtgcacgacgacaagtaacagcgaagtgcaagtgattgccaagtataatagaatgaaccatcatattcttgcagctcgctggttgcagctggttatgagtagttgtagtcggcgtcgatcgtgacgcgacccaatccacccggactggagctgaattgacccgaaccatcccccccccactcccacgatcgacccgagcggaattagcctcaaatcccagccgctgctacttgatcgtcgaacatctcccgccctcccgcattcgcccttcgtcctgccagccagtgtcatcgccgtcaccgtcaccgccgttgctgttctgtttctcgctgtcaccaagttcggattgctccgacattggtgccccactggctgcccatataaccgaacatccccggtcgattcggaagttcatttggatccgacatgttcgatggataatctgttgacccgaagagaggttgcgctttgtcgaaggcttgcagacaccggaggttggcctattgtgtttcgatatccataacgttcaaatcaacgatccccgatgctacggccaacaagtagacgatccgaagttcaagatatgatcttactgctcgaatcgacctggttgtcatcggcgatgacagcaagccagagtagcgcgatccgggctcgtaacgaccgagacctggtatggctatcaagcaaatcgacccttcgatactagccaaatcaagctctttcgattcaggtccactgatgtcgattcaggtcagtggaaccaatcaaaacatgaagtggaatgaatcgatacgtatcacgatatgacgcaaagggtacatgatatcctcggtcggactacgagactacaagacgcttgacggtctacactgcggtacaggcagaatactgtacagcagaacatatgagtcccttaacagaccatcgactgcactgtaaggcccgctactcagccgcgcttgagctcgtcgatgaagagatcgttccccttgacgtcagattggctgtcgttttgggaagcgctgtctgtaatggcctcttcagcatcgaccctcctgcgtcccttgagcatgccgcctccgagaacgtggacctggtcgaacacggccgatgctgtttccgctgtcatcttcttggtttctgggaagaacaagaagatgatgatgaagtagaacgtgaggatgcccaggtatacaccgtaactgagagggactcaggattgatgagtatgtgctttcggaagttcggagaaccccaacccactatttccagccgatctttcctagcgcaatagggttcacgaactggttgaaggcgttaccgctacaatcatggatcaaccgatgtcaggtgaggaatcttgtgaaaacaatcggctcagcgctcacaaagtcgcgatggcggtgaacaaggcgattcctttgcttcgtaggttgaacggcatgatctaagtggacaagatgaacacatgtcagtgagactgatattataccgtatagagaattgacattcgcaactaacctcgacagtgtaggcgaccgggagaggggtgaacgccgaggagtagaatccaaagtagctattggacaagccgtgattgagcgtcgagatgtgagagggggtgaggcggagctttgctcacaggaataaaaatggaactaccgcggcacctaaggaagcctttttcgtcatggcaaatccagcagagagacccatgataatggcaaacatgaagaacatgccgatgacggaaaataagaacagtggtcgccttccagagcggtcgacattgatggaggagatggtggcgattatgaggttgaagatggctatatgggacgaacattgtcagtaacaagaataattataggtcaggctattcaatttgaggctcaccaagaccgacgttaattagggtgattttcacgggctcgctgataccgacgctacgtaaaataggtgccaagtagctatgcacgaagggatgtcagctatatacccagatacgacaccgcaaagctgatatgaaaacttactatgagatgataccgttgcccatccagttcagactgaatgccagcaaagtcaggaccgccaatcgctttcggttgccaggggtcttggtaaagtccaagaaggaaacttgttgcgagatggactctcgctccaaggcagcagatatttcccggagctcgagctggactagggggtcttccatgtcgccattggcatggtacttggcgagtacggcgtgggcctcgtcgcgcctgccttgcttcataagccactgcaaaggggcggtataagctagggttccttcaaaggtaaattttgcagctcactctgggcgattcgggacaaaaccacaagatggggaagatgaatcctggtccaagagcttgcaatagcgaagaaaagcgccaactccagttaccgggcacgtaaagtccagcgactgaaggcacaggtagcaattggctggagttctggacgcccctgacctatcccacttacagcacatcaaggcggcgaccacttgtccaatgtaagcgaaagctacgcaagaacggttcagcatagaactatagaaacttataaaaccaggccttgtgagacacttactctggtagcacgagccgagaatgggtcggagtcgaggatgcgcgttctcctgaatcaacactggggcagcaacttttgccataccgatgccgacaccgatagtggctcggcctgataaggcgaacgtcttcagcgtcgtagcaacgcgaagacgcactatgggtacgcttacctccaatccacatgccgacgttgatggcaagagcattgacaaaggtgccgatgagtacgaaaagcatgccggtggcgatgcaagcgcggcggccgtactttgtcgagacccaatctcccaagaaggccgatggcactgagggaataaaatagcttgcgctcaagaggccgagctttgctccttttggaaagttgaaaaatcgttgccaggccgggattgcctggaaaccttgaagaagagatccgccgactacgtgtggtcgcgttagcaaacgcgtgagacccggatctatctttgctttcgttacgcacaaccctgaacgattgatgtgcacgcttgttagtcatctttcatcatggcacatccttctaaagactcttacattggtggcgatcaagaggcacatgcccagcctgaaccaagcagcaacgacgatatggtaggttagcattttgggtattttatacggaagtaaaacagtcgcgcgcgcgaccttcggatcaggggtccggctggccgagggtaatcgagaatcactcacccatagaatacgttcatccttagggcagggtctcggtaccagagacgatgggtgttgtctgcaagattagatctcagcaaggttacatgtgaagccctttgctgggacgccgactcactagccacttccgtccatctgggggcggctgcagacattataggatgttgattggacttggactgatcgttgaccggcgggggaggggtggaaggacggtgcttggtggagaaaaagttggagaaggtggggtgaatggagaaaccatcttgggccccctggtattctatatacgagtcgaggagccatatcgagtgaggcgaacaatcttggaatcggctgccattcgcttgcattggcaactcgtcgagccaaatacgagctcggtatactcgcaacgatggcaggcgaccggtgccaaattatcaatcggagatctctggtctcgcgcctcgacgacggtagcagaatccaatcttgcgtggcaagtcgcggcgcattagcgaacgatttgagcgagatcccgcgaggtgatcggctagagccgacgggcagctgctctgtctatcgagagtaactcgccaggacaatatcggtccggcacatggaatcgtccatcgggtcacgccccgcacgtagtcggggaaggatagccgacgcaacataccttgaagcaacttatatttgtggggaagtgttcctcgtcagctcggacgaatgacttatgctcgacaagtacagaatcgaccaaagttattgatccggcatcggaacttagcttttcgctttgcaagttgaagtcttgcccggaattttcctacaaaatccagaacccaccagcattccatcatgctcaacgttgaagatgttctcgccggcctgactcttgccgagaagatctcgctcctaacggggtccgacatgtggcacactacctcgctggaccgcttgaacattcctcctgtgaggatgacagatggacgtatgtacacgctagtttgtgatgtaaacaggatccagtcgaaaaagttaatttgtgtcgacaactgtagcggttggcgcgcgggggacagcgttcttcgcaggagtggcctcgaactgttatccagtgagtggcaattcgggtctgcgcttatagcgagggctaatcgagtgagatatattgcttaacagtgcgccactggtctggcagcatccttcgaccgcgatctgctccacgcctttggaagatccatggcggaagaatgcaaggccaaaggagcgcatgtctcgtaagtgatcgagctccatttgttctacttgatcgaacggggccaatggagacaccgaacgatgatgtcgctaacactcctggcgatagacttgggcccacgatcaatttgcaccgctctccgctgggcggtcgcggctttgaatgcatcagtgaagatccagtgctgtctggcgagctagctgccagcatcatcaacggcctgcagtcctcgggcgttgcagcttgtcccaaagtgggcttctacaatacatcatcccacagacactagcacaccctctgatcagctgcttcctccttctcagcattacctttgtaacgagcaagaattggagaagcatcgaaacagttccgaagtctcacagcgagccttgcgagagctgtatctgcgcgctttccagatcgccattcgcgaaagtgatccatggaccctgatgaccagttataacaaagtaaacgggttacacgttggagagcatcctttcctgctgaagcaggtactccgtgaggaatggaattatgacaaccttgtcatgagcgattggtaagcagtgaaacttattccggatcgacctgtgacacaatttacacgaaaccctgcaggttcggaacttactcgaccgcggaggctcttgtcaacggaatggaccttgagatgccgggactcacgttgttccgaggtcatgctctccgacgagcacttatcggaggcaagatcgaagagtcgcacattgatgccgcggtccgcagggtacatatggctcgatctgatgcctttagcgctcgctaattccactggtttacaggttctggcattggccaatcgggccatcgagtccgagattcctttcggactcaaagagggcctcgtagataaccaagaggttcaagactttttgaggcaggcggctcaatccgctatcgtcctgatgaagaacgaggcgtcactacttcctctcaaacgcaagacgatccgtcgaatcgctgtcattggccctaatactaaacttcaggtcctgaacggtggcggctcggcaagcctgagggctcttcggtcatcttccccgctggaaggtatccttgatgcagctgagaaggaatcggtcgaagtctcgtacgcgcctggagtgtacgctcatcgatacttgcccctcgtcaaccccctggtgtgcagtaagaggagcggaaagggatacctggatctcaactttttcgagaccgatcctaccaaatcagagtccaaagtcatccatacgctcagcgttgatacagccaacaacttcatggtgagcttcctgatatcgtccgatttctttccggttcgatactgactgtgtgcatgcctggtaacagtgtgataatctgcccagccacctgccgaacgagtgttacatgcgtgtgtcgactatgttcacccccgatagctctggtacatgggagtttggtctcgttgttgggtaaggcgaccttgtctcgatcggaccttttccttatcactgacacacaactgtgtcttgatgatagaggtcaagccacgctgcacctggacgacaagctcgttgtatcgaacgtgatgccccagaccgctggagagttgttcctgcgcaacggctcgatcgaggagaagggcgagatcgagctagaggcaggcaaggagtacaagatggtcatggaatggagtaatttccatcagaccaatcctaaaggtgagtataaccagtctcgcaccgtaagaggacttcaacgcctgaggcggcatgctactcggtatcatacagcgagcttcagggcctttggttgtttccgtatcggtgcctcccctgtgattgacaacgagcagggtatcgtagatgctatcgccctcgccaaagaatgcgacgccgtcatcgtctgcgctgggttgaacgaggattacgagagcgaaggctgtgagtgtcgcgcgcgtcagaaaactctcaatgccttttctcggaggactgacggattctcgggtctagtcgaacgacctgatatgaagctccccggaagaacggacgagctcattgagcgtgtcctccaagccaactcgaacatgtgcgtggtagttcaaagcggtactgcgtgcgaaatgccgtggtccaaacgcgttcccgcgatcgtgcaggtgagtccagatggcgatcgaacgacctccagatacgagtctgtcgtgttcacaatacgttgtctgccgtgcgataggccttctacgggggaaattccgcaggcttagccatcggagatgtcctcttcggccacttcaacccgagcgggaaactccccgtctcgttcgctcatcgattagaagacaacccttctcatccgttctaccctggcccacatggcaagagccattaccaggaagacgttttcgttggctaccgcgggttggccatgagggacactcccgtcctggcttgcttcggacacggaatgagctacacctcattcgagatcggtcagcccaagctcctcagccaaacgttcaacgccgagtcccaaaagatcgacgtccaggtcgaggtcgaagtgaccaacactgggtccgagtacgccggtagcgaggttgtccagctttacgtcaagcctagcagtacaaccaaagtccctcgtccaaagcgagagctggccgatttccggaagattaagctggagcccggtacgagtggcaaggtttgtttccaactgtgcagagacgctttttcgtactggttgtcctctagcgagaccactggggcgtggaccgtcgatacgggtcgttacgagctactgattgggacgtctagcgaggacatcaagcattccttgccggtggatgttcaagaaggtttcacctggaatggattatgatcgtcgctcaagccggccccatgtagaaacgtcttgtcattcgtagatcaggttgtctcaattcttatcctccttatggttaatctcgttggcttatttgcgaacggtttagttctcaactacggccgtgacgtactatactgcagcaggttgggagggtgtagccttcgcaagctggcatttgtctcgattacccgtcgaatgtgactgacactagcgaaccattcggatttgagacaaaaaatacaccagcgcgttcgagtgagacctgcgttaaagtcatgattgttcgatttttaggtcaggcgaatcactcggcaggacttacatataaggactgtgtcatcatcaatttgctacaaaaagtggtactcggggattggactggggtacatcaggtgcaatcaccgtccgttgtcgcctcttgcatgccatgacaagatgagacaatcaccgaggcctcgaccggtcgagcacgacaccgactgtttgtaccgcggatttgtaatcaactacattcaagggagaagtggaccccgcggctcagcggggatgatgcgataaccatcataccatccatcaaaaggagatcaacgatcaacaagatcaaagtcgtttctccaaaatagtgttacctcgccgacccgttgcaatctcaatcatactttcgttttcttcccaaacacagtcactactcttctctcgtcctctgtctgatctcgctggtcgagaacagatactggtccacacccaaatttcaagaatcctttgacgacctgcctttacgcccttttaacgaccaacataacgaacattcaaccgattatttctatcgatcatcagcgacaacgcaacacgacggatagtaggaatgtcacgaagagctccgcctactcccctgatcttgtccggacaggcgacttgcgtttcaggcaagtcctagtgtgtgacatgggaagcgcgagaaagttggggactgatccgatgatcgggttgttatcgtggtaaacaggaaaacggagcaccaagttcagcccacctacagtaagttgcacatgccttgaggagttccggcttcaccatgtctcctcgctgatctcgcacgtattccttgccgcagattcctgagcctctcgtcctccccccttcaccccgtgtgaaacctatcacccacgtccgctcctacccacacccacactcgtgcctagtcgcggctccggtctaccgtctccccgcttcctcaaacgagctcgtcaagcctgatgagctcgttcgaggaggtcgtccgaggctgaacgtggacatcccgttgacaccttggccttacctcttggaatcacaccttacctctgattcctcgtcatcctcttccaggacatctcccttctttccaaactctatgtcgtcttccaacgtatcgggatcgggatggggatcaaacgcccatctccacggtacgaaggctaagaagaagcttcctccctggttgagctcgtcctcgggatcttttgacgccgagagggaggtagcgggggtgttacagagaccttgcgaggtagggattgccggtcgggtgaggggaagatgagcccgttgggatataccttacgaggaccgagttgggcaggtcggtgcgcacaagctacagggacaaggcagccatgggcggtcgtcttcgatgaagggtcacgcttggagcgaagggttgagacgatggatgagcctccgaatgggtggatgatgatgttcgctgtatgtatacggaacgcacctgtgccagagtagacgcgttaggtggctgtgcctcattgtcgattatgacgcttacgcatactttgccgcggtgctgtgtgatccctttgcgcctctggtcgctctcgggactcttagctcagagatgccactgaggtcttcttttacatctcgtggtgtcagaaggtctacgatagctgcagcgacatggagcagcttgtatatacttgctaaccctatcctacttggagcacttcgatagtcctaatcactgtcataataagcttccgacctacactactgattgtctcgacatatcctcccggatgtaggacatcgtccaaacccagtgatcgccctcagacctcttcccctccgatttacagagtgtgactgccctgttccaagtggtcgaccaatacctttcggcgaatttcattacgcgcggcttcggggttcgggggatttaattgaccgaggcgaggggtggatcctcggaatcgaagttaagataggggttgacatcctgtattgttcgcacatctcgcattgttgttcagcaaagagtccagcgatctgaaacgatcgacgactcaacgttagaatacaaacgacctgtcgtgttctccatcttcagttccgacgtcgcaaatcgatcaaaacgaccttgaaagaaaccacgacaatgctccggacgtccctcgggacgaccttgaaaacgccgatacgacccatcataggtcgtcgatatatcgcctctctccaaaagaatccacccaccccattccggcctgtccgtccaacccggccatatgtccatatgggccaccgtatcccattctctattccccttggcaacaaatgggttcaactcgcgatattcatcgccggcgtaagccgatcgtctgcacctctcgcggggtctcttctgactgacgactggcccgtagatcgcctggcaagctgggatatggtatccatttcaagacgcctcggcatccggacctatcgaaaaggaggaagctgaggatcctgatcgcgctccggccggatccaagggtagcaagaagctcgaagagcagaccgggtccaagcgtggaagaggtgccgggagggatgtcgacggcagaccatacttgaccatggaccaggtcgccaagcataatttgagtaatgatgcatgggtggtaatcgatgggaacgtttgggagtgagtaacaccccggatagacgcatcgaacgcaggctgacggacgtcacccatagcgtttccgattttctcccccatcatgtacgagatacgagccgatcatgtatcttttacctgctgactcttgtgatcgtctgcagcctggcggatctcgaattgtgcttgccaatgctggaaaggacgcaacgtctgtactctttactccccttctatctcccttgctcgtcagtagctgatttcctgccaacggacttacagcgagatcttcaagcaacttcatccaccgaatactatcgccaataatctcgatcccaaacaactcaagggccggatagatcccgagctagcaaaggaagtaagattaccgtgtctcgtgtcgttggatgagtttgtcgacatcggctgaaaccacccctatcgatagtacgcggcatcatacgaggcagagatgaagcggctgcaggaagcgagagatgctctcccaccagttgagaccatactcggcttgcaagagatggaggtcagtacgataccaagcagacagtaactactcggaccgtaaatgactcgatacgaatgggccaggatgctgcaaaggccgtcttgagcaaaaagtctactgcgtattacgagacgggcgctctggatcacgtcagtaggtccgcaccacttattgagttcccatactcatcattaatcccaaactggcacacatagctctggatgagaacagtaagacgttcaagaaatgtcgtttgatccctcgagtgatgcgagatgtcgggacgacatcgaccaaaaccaaaatctttggcctcccgtctgcacttccgatctacatatcacctgcatcaaatgcattactcggacatcccgatgctgagttcaacatcgttcggggagcagcacggacgggtatcgttcagggggtcagtgcagcgagcagtcttcccctcgacgagctgttggacgagaaacaccgcatggacgaggagatcgagcaaggaaagtggggaagagggctcggtgataagatgggaatggtctatcaggtatatgtgcaattggagcgagaaaagacggccaagctcgttagagaggcggtcgacgggggtgtagggttcgtcatgggtaaggactgattcgccgacggggcctcgcgactgatcctgaacttgcccgtagagccttgcttttgaccgtggacagcaacgtcctcggtcaccgacaaacgaacgaaaagctaaagggaactacaggggacgccgaacctgccattcgagctcagccaaatactgaatggccggcttatcatgatgctcgactaaactgggaggatctggattggttgaaggggcttgccaaaggcacacctatctatttaaaaggtgtttgcagcgccgaggatgtcaaattggcgaaggaacacggcctagcagtgagtctgataggaggcttcctgcctgctttcatgaagggctgatgtcggaatggacccagggtgtaattctgtctaatcacggagggcgccagcttgaccagtaagctaaggcgactttgaaagccactttctcgcgctgacgcggccgagccttgacagcgctcggactgggttcgattcactgagatctttgcatcacgacaagccggaattactgcgagatcccgactttgatgtgtatatggacgggggggtcaaaagaggaagcgatgttttgatggcgcttgcactcggcgcgaaaggtgtaggtctcggtagggcgtttttgtgggcacagacggcctacggggagagaggcgtcataaggagcattcgaagtgagtctacttggcttcagaataatatgcgtggtctgactgactcgctgtctgcagtcatggagagcgagatcatcatggcgatgcgcttattgggggtcaataagatatcagacctgaagccggagaacatcgaatgcctgcaagaagtgtggagatgatggggatgaacgacttagacgctttgtacatcgacattgatcgaatcgagtgtcaaagaacatctcctggacccgaaagcgtttttacgaaccagcaaaacacgcgtcaatcagatcgtctgaaagctatcatgggcttcatggagcgaccttctgcgattttgacgagcgcctgtggtacctatcggctgtatcacgacttcattgcgtagtcgggcggaggaatctcgaccgtatacttcgagatcgtttcagcaaactatggctctgttcattctttcctgattaccttgtatgcgctcggacactgtattatgcacatcacgtcaagattattgtagcctcccgctcatctatctacgggcaagttgaaacgcttctcaaattcgaactgttcctcaggaccacagctaccgtacttgtacttgataggtgtaggcccgttgggaccttcgatatacttcaagaggctgtagcaccattcgatacggtcagcgaaccgggaaccggggtccaacccggctgtgcagtgctcacggggtgaagatctcccaagaagcaatgacttcgtcctccctaacgaacccagactggtctcccttgaaaatgttggcaatgacaactgttatcggagaggactgaataagaatgtggcccctgttcctgagtagacacgccacttgccctcgtatgcaagtttgtctcccgcgaccttacgtccgggcaccatgtacttcatctcgtccgagatggcatcaaatcccttggtcaaaggtttcaacaggttggttttgaagtagatggctggctcagggtttagacgaatgacgagcgcgctaggagccgacaccttgaaaacgttgtgtttcggcgccttgaagttgaacgtcatggtcatgacaccctcgtccaacgctgaaccggaagcaagagccgaagtgagtctacgtatcccttagacctcgtttattcacctaactgacctttcccacacttgaccaaaacaggtacacctttccacctctcgttgtcgatcttcatcgcccactgagcaaaggtggcagtcttgctgtcatccggtacggtctcatcgtcgacatagctttgctttccatctccatcggtgtattgtccgagaaccaggtccgagtgctcgataggtggaatgctcttgagcactgcaaccttgttatccctcatcgaatcgttgtccatggaatctggcgggtccatggttaggatcgaaatagcctgcaggaggtctgtagcgagacaacgtttgaggctcgacccgttcggactcaatgatccacgctgctaatcgcttacggttctggccgacatctctgatcatcccaaactcgtcaaagtaacctcctctgccttcggctccgaacttttccttcatgacgaccgagatgctttcgacatgttcccggttgagcaagggttcgatgaacgaatttgcgaatctcaaatggtaaatcgcccggatcatttcttcacctacatggttgtgatgtcaacgtcagtatcaaggaggcctgcccatatcaatttggtgtgacttacctagataatggtcgatacgatagatctcatcttccttccaatccttggcgatactatccatcatatccctgcagtcgtctgtatctttcccgaaaggcttttcgatgaccagtcgattgatctttccgctccaataattgttcttcttgatcatgtgggagacttgagcaaaagaggaagggggcaatgccaactggagacgtagcgggtctcgttcagtcgcgtgatatcatccgaaacggtcaagactgtgactgacatagaacactcggttggctctcattccgtcgaattcttcctgctcgatccttcgcatttctctgtggcagaggaacgtttgtcagggatcgatcacgcactgtacaatggagcctgacctacttttccagctcttggaatccttcgtccttgtcgtaagggccttgtacgtatttggtaatctattgaaaccgatccaatatcagctctaatcgtacaaccgacttcgaaccagcctgagcgtgctgaccttcttgaactcctccttcttcgcagcgtcctccttggtgtggccttccttctcgtcatcgttgatcttccagaacaactgctcgtcaaacttttcctctggcatttttgatcgggcatatcccaaaatcctggtctctgtcgagttgtgcaagacgaaacgagacctgatcagaatcgatgcggatgtccgaggtgtcattgccgtattgtacgcacttgggggtaagagaccctcgacgagcagcgcatacagggcggggaaagtcgattttttagcaagatctccggaagcaccgaagactatgttgaaatcgttgttgaagttaggtttgacgaggcggggaacgatagctagattagccagaattcccctcccttttggcgtcgcaagctgacgaaccgactacgatcgcgttctcttcgatagctccgcttcgttcttcagtagagttctttgacatgatgataagttatgttgtgggattgccttgttaaatcaggaatttattgctcgtttctttggtccgtgatgatactatcagaagtcattcaacatcaagtgtactagggtcggttctcctcgatcgaatcgaggtatgaggtcatccggaagcaaaccggtccgcatccggaagcatattcaagaaagcttcggagcgccatcaggaagggtgattgtttcggaagtccgaattgtctatggccgtttggcaaccgaaaacaccaatcagtatcgttgttcattcagcttgtcatatgacagctggtacgtacaggtctgtggagtagccagatcatttcataccccaaacttacctgacactggttcgtatttgtcaacgtcatccgaaaaaacccttgaaagcagtgaccgctgcacctgcgacgattctcgcatgcggaagtgcggctgacggttaggtatttcttggagcggactgatatctatgcaactaccatctccacctccctgtgcgaaaacgtcaatctccaagtcgaagcccgtagcagagctctgctgaatcgacggaatgtatatctatcactagatcgctaacgacctccttcgcatcagcttccggattatcccgaaatgctcccggaatgatcatcgacgttgccctgccatcgtattatacattatacatcagtctcactctcacgcaggcatcggctctttcaaggaaagctcctggctagtctttcgaagctcagtatatccgatcacttgttcaaccatcgcggacatgtctcgaacacactctttccagcagatcccgagtgatccggatgccaacactcccggtcgacgtcgcagtcggcgagactggggaggtatcctcggcgtggttctgaatcccgttctcggggctctggaaatggcttggaagcggtatcagaggacgagtcgtagacagaaggtgaattctgatgcttcagcgtcgaccgagatacttgtgcatatcaactgatagcgaggtggtttcgttctgcacagcttattatatggttcgttgtctatttgcttccctcgatcggtctgtatccacagctattgacgaatcatctcgccgttgtaggattatcgctgctatcaatgttgctatacttctagcgattgtcatcgtcacccccacccggattctccagtttgtccaggacctttccggctggctgcgagatcaagggtcgttcggtgctttcctcctcttcatggcaactggtgagctgcactccgctctgcatcgtcccactttagcatggagttgacagttggtaatacttggtctcgtagtcctgtcttctcacccaccgttattcgggttcgcgtcatccttgacgctgatcggtttcacatttggcatgtggcccggagccctgatcggcatcatgggcagtatgtgcggatcgggactcgccttttggagcatcagagtatgtaggcggtgtatttcatatcgtcgtctgttcatgtgggaacgctgatagatcgatccgcgcagacgttcttctcgcagtggatgaaacgattcggagcaggtaaatcggacaagtgggaagcgttttcgcatgtcatcgtaagcattatggatgcgatcgcatgaacccaagtaagctgatctctgtttggccgcgagcacagaaggcgaaagggacgatcttggtcatcatgattcggtggtgcccccttccctgggcgctgagcaatggcatgttcgcagtgagttttaccaatcgccacacaattcaacttggaacgctctctgatttgctgggtcgaacctcgcagtctatcgagaccgtctcgttcccatcgttcatgctggccaaccttctgcttcaaccgaggctcatgatcccgatctttattgggtcaagattagagtccctgactgaatccggtcctgctgatccggtaggcaaatggatcaacttgggagcaatcttgcttggaatcagcatcagtgcgggaagtgagtcttctggagacttgtatacggtttttcgtgaaatgaccctgacctgtttcgccacattgcgcagccggctggttcatctaccgcgctaccttgcagcagatggcgcaattgcgagcctcgggtgaactgccagaaaacgagattgatgaagccgaggatattctcgagagaaatgccttgctcggtgacttttccggcagcgacagcgatgctgaagaacttcgtctaggaggtgtgctcgagaatgggcacggacatggtgttcacaagtcgagcattcgctctggccacgtcaggcaggaaagcgtttagatctgcgcctattccgtcatttacgtggacgatcgtacattgtatgcatatctcgagcgatggaatctagtggtcgacaggttgaacgaggaaaccgaaaagatgtggagcatctgaattttaaagctctatttacaacaagacggaataactggtgtggaggaggtgcaattatgattttttcaggcggcgagtctagggggtgggctgctgctcggcgtggtccctccgtgacccatcatgcgtactttggggcggcctgacgtatgaccgagaggcgagctgtgatcgggtgattgggcttcgtgttgctcgggagggctaaggttttcgaagaactcctgcaattgtcggactcgaggacgcttttgcagaggggtggccttgtcgggcgtagcgggaaggtcgagtgccttgaattgtaggtttattcccttgtccgccaggatccgagagatcgacgtcttggtctgggtgcccgcttcgtcttccgcctcggaaggctcggagagatcgagcagatcagcctccttttccggctcgctttcggaagaaaacttgagcaggtctccctccttttccatctcggctttctgagcgacgagtcttcttgcgactgctcgagccagagtatccctttgagcggcattgcggtcttcgggctttttaaaggtgacgctcgctaccgaggtctcgccttccgtctcgacgtccccctcggcgccctcgtcctcggtcggaacatccgattcccattcgatggggatcgtctcggctgatgaggagggggcgggactcccagcgggtatagggaacgcctcgttgagaagcggcgcagccggatcctcggacgacgatcctaagttgatcaccaattcggccaatcgacgagactcgatctggccaaacttgttcggcgtcatcgtcggcgagtttggatgaagatgtccttcgtcatccgattccggtagtggggtctcttgtgccagaagtgctggttcggggctggcggctggggcgagctgggcgatgggcgagtccggagggaacctcgcagtaatctgcgatgcgattttggttgggctagcgatccgagagacatcttgatcgacgacggccagggtaggcgagggcggtagtgggatatcactagcgacgcgttgaacctctgacgtgggaacgataaccctagctttcggtgtgggactggacgtggccgaggatcgcgcatcgggcacgataatcttgactttgctggtcgagctcaccattcccctggacatgggtcggaaaggtgtcctctccttctgctctccctgcgatggcaaatggctcctcgcccgtccagccgcggcagtctccccgatcgctgcccttgccgggacgacctttttcttgggtaccgtcgacgaagggagaggaggtttcatcttgatcctaggttgacggggcgagacgacgagtttggcttgaggtgacgactgaacggtcctcgcggccgttgcagcttgactggaaatgggagccctcgcgacgggcttgacctgcgcctgcttcgtttccctcgtctctgaagcctgtcggtcgatctttttcacctcgctaccttctcgcgaagtcgagcttgttggcctaaaagtctgtctccccgtgtccgccgtcttcttttctcttggttccatgtcctcgggttttatgagagcgggcgctgaaaacacgtcgtcgtcttcccgtttgccttctgcctgcttggcgtccacccgagcttgcactcctggtggcaagatgggtttcctcgccgtcgttccgatgatcccggcagagacgtttctcttgcccatcaacccgaccttttgccccgtcgccgccgccgtcgtcgtcgtcgagctcgctgtgaaccctgcgctcgtcacccttgcctgcaaattgggcctgacgggcgctccaaacaagttccccctcggcgtcaaactcgagccggcggattccttgccttccgtcacgttggccagagcggtgtacgttcggacgggcctgacgggtccctgaccgatagctgccaaattggctcgtcttgcttgagccgtcgtcgttgtcgcgccagatgttcccgaagacgatgcgttcagtagggtatcggtggaagagacgttggagatgacgcgtggacgactgggtcctgccgaggcttgacgggtatgcgggatgggatcgatcatggattggatcgatgtcgagtgggttccggaattcgtcgagatctttgacgacctcgatccggcttgaatgtcggccgaggagacggctcgggagtgtagtccaggctgagcgagggacggctgggtgtgggattggttttgttgctgagtgatgacggcggccgaggtcgacctgctcagcgccgatcgtccgttgttgaaatccatcgctgccgtcgacgaggaagatgatgacggcaaggtcgggaatggaaacccacccgcgccttgtcctgccgacgtccccatcatcctcatccccgaggatttcgaggctgaacccgcactgaccgccctctgccctcccgccccgatttgtgccgaagtcgagctcgaactgaccgacctcgaggctgcggtcgaggatgatcccagcgcggaagggtacctcggaacggatccggtcgtgctcgtagccaacgggtgcatcttgggtggacctccagctgagggtttgatattcaagtaccttctcgtcgtaggtgtcagcggggtcgtgaaactgaatctcgaccgggtcggacgcgcggaaaaagaagatgacgaagaaacccggcgggaaaaaagcgagttgaaacccacgacgatcagtaccccttttgcaatcgcttcggtgtccaccctcgccgacgccacaccagacactcacctcccgaccctatccgcgtagagctcgttatagacctcccacatcccctttgcgatcttcctcacctcggcgtccctctccgtggccatcctcctcatcgcgtcctctacctctagcatccccttgttgcccatcatgcctacctcccaagtctgtaggacgaacgctaggacacctccacacgctctcctacacgtatcggatttatcgtccaccccctgtttgacgaggaggatgaaagacgggtgtgcgcagtactgagcgatggtgtggagtgatttctcggctcgacggaggtagaccttgttgggtcgtgcgaggagtttgatgagtggggggacgtagagagggatcagggggataaaggaggaagctaggcggggggccatggatgtgaggaaatcggtagccacgccagagagcttgccgcggtccgataacatctgcgcggcgggggggagatgagagagacagaaagggaggatggtcaacacgtcgtccctgaaggcaagcatatggttttgacgtctgaactcacacatcggacgattttgtcacccaatcccttgatcccgactccttgcatgtaaacgtctgtatgtctgtaacctccaccacgggtgacggctgcgaaacggaggagcgccttttcgaatttcccccacgtatcttccgtctcttcgggtgcgagcgcgtcttccaacttttccagctctaggacgagttgatccggcgtggtacactgcgattccattcgatttgggtggggccagttcgagtcgacacggatacaaggcgagggagacgacttgtcagtcacgagatccatgtgcagatcgatctcggtgcgggtcgcgagcttacggggatcttgtcatcgctgcctatagctttgggagccatccttgaggcaggtctctttgttactgttgagagaggatgcgtgtgatgggctggacgttcaaagagttagaagagaagatggtgatacgtgatgatgatgacatggtgagagaggtagatgttagttcaacccgctctcaaggttcctgtcggtgttgaggcgaggtttgtttacatctcgcgagcgaatggggcgacgcgcacagtcagatagactattacgagagagggggttagtggtgtggagactccaagcgagtgtccccaaatgacccaagaggatgacaaatcatatctggtcacttccccccctcccagcgagtgatcacgtgatcatcaaccgacgcgagagtcgatcggatccgacccggggaccttacctccctcccgtcagtacgtcactctcgaatgacccctggctgttgagttatcggttgatcaaactctccgttggcctctgaccaaagtgtcaacctcgacctctgtaccacgacaaccacgaccttcaagcacgactacctgccactggggcacttttgaccgtccaggtcgatacaaccgtcctcgacctcgacctcgacttcgtcaacatgggtgtcaaaggtctatggtcgctcctcagtcccgtggcgagaccgatcaagtgagcaatcgacctaccccatccgcccatcatctcccgcccggccgtcaaaagtctggtttgtccgatatacgtacacgcccaggtctgatccgccctttgtgcttttgctcttgattcctcgtcataggctggaaacgctcgaaggcaagaggatggccatcgatagttccatctggttgtatcaggtcagtcgaacgtcttcgatatcgagtcgcaagtacctacccgacccaggctgaacccgccgtccgacttcccgtgtcctcctcttcctcaacaccgcctctctgcgaattgcatcccccgtcccgcttccaccctcccctccccctgtcttccgtgccgacgccctccaacctagttccaagcgaccatgcgcgacaaagagggccgcgtcctcgtcaacgcgcacgtcctcggattcctacgccggatcaacaagttgctcttccacgggataaaacccgtctttgtctttgacggaggagcgccgaatttgaaacggtcgaccatcgtcagtatcgcctcgaggcgtgtgtacctgccccgcagcatcaagcgggggttgggatgagatgagaatagatgtgatgagatgaggactgacggacggcggatatgcggttgggcgtcttcgtttttgcgtttgctttttggtttgacaggcagagaggaggaggaaaaaggcgggagcggcggcgaatcatgccaaggtcgctgaaaagctgtttgccgcgcagatgagacgagaagccgtcaaacaggctcaagcgtgagtgtcccatggattcgcgttcggattccgggttaggggtggtattggaatgggatcgagggttggaaagcaatgatacgggtcgtaatagaaagtattccgcgctgataccgatcgagtctgttcgtatgtacacgccgtgtacgtgataggcaacgcgagaaacaacaggaaaacgcggaactgcagggtcaggccgagtatggttatagaccggaagagggggaagctatcccacggaacgccgagtacctggaagagctcgaggatgagggtccagggacacgagtcacgccggtcaggaagaggcccgagcaggcttctcccgagggtccacccggtgggagtggcggacctggaggagcaggatctcccagcttggacgagcttggagaacagaggaggaaaaagtttcgcaaacacgatccgtaccgtcttcccgaactccccgacaatgcgtttaggccgccgaccatgtcgggtccatcgagcgggtcgaaatcaactggacccggtcgagcttcccgtctagacccccgactcgcgacggaagaagaattgcaacatttcatcgaagagatgcgtccggaagatttggatttcgattcccccgagtttcactcgttgcccaccgaggtgcagtacgagattatcggtgatctccggatccgatcgagacagcagtcccacaaacgtctggcgtccatgttgcaaaaggccccgacgccgttggatttctccaaagcccagatcgcccaactcagtcaacgaaacgtcctcacccagagattattgaccgtcaccgacacgatcgggaattccgggttgcagatccccgtcagggtcgcgagcgagaggaacagggagtacgtgctcgtcaggaatcccgaggctgaagggggaggctgggtcctgggcgtcagggatcaaggaacttccgaggcccctatcgtggtcgaagagagtccacggaaaaagaagccccagagagcgaggatcgtggatggcgtgttgcgtagggaaaagagacggcacgagaccgatagtgagggtgaacgcgaggatggtgatgaagagcaggacaaggatgaagacgacgaggtggtccccattccgttccctatggacccagacttgagggcttctaggcaaaaggaattcctcgatgcaatcgcgcgaaggcataccccgaaaaaaggagcaggcaaggagacttatgatcaggtcatcaaggccaagccaaaggcgaacgagagcatcccactgttcatcgacgaagaggatgtcgccgatgtcgaagatgaggatgccgctgacgactttgaggaggtgcaggtggaccgaacggattcgagggggacgcaagaagcggctatacccatcgacaccgaaccgccatcctccgacattgagatggaagagatcgaagtcgacatccccgtccccgacttggacctgaatctagccatgtccgagagcgcaatcgacgccctacgtcggcgggaagaggaagatcgcgccctcctggccgcacttcgcgcgagcaagtcggacgcgcggctccactttgacgcggccgagcgggatgggagcatagcagagaccaggtcgataatgacagatagcgccagagatctcgagtcggacaacgagagcatggaagaggtgccagccgcgtcgaaggagtctttgccagagccatttaccgatacgtcgcactttttccccatggaacaacccgtagctggaccctcccggacgactatcattaccgataccgcgaccaaaacgccggtcgaggcggcggattatgcacagccttcgacgcccgcgctacattcgaacggcctgctggacatgaccgcggctccacttgtagaagagccaccactcgtcaacatgttgctcgtcgagaccgacgtagacacgacgcaaagtacacccaaacccaaagtcaaagcctcggtcggtgatcacgtctcgacgccgacgcctagagctgtaggtaggtcacctggccaacaggcggaacccccacatgcaccggcatcgactcatgtcgacaggcctgtctcaacccctgctaaaacacaccgagagttttcaattacgcctaagccggcgcctatcgctcaagaacctgtcagacgtgccgtaccgattctgcctcaagctcgagcgatcaagacggtggagatgcctgcgatcgccagatcgtcaaaagcccagctatcaggcgaggaattgcgttctctttcatccgaggacaaacaagtaaaacggacagctaccatccgacgaccttttacagcctcggattcagatccctcgccatttctggatagcgctgatcgaggtggcaagatatccgaactgcccgatatgcccgaagttgacatcgaccccatggaagatgctgtctccaacgtactggagggttctcgagataacggacctgacatcagcacgcctatacggccacgcgctcagactattgtcgatgaaaaggaggacatggagtgggaagcatcgcctcctcctatcacacggccgctctcgcgaacagtgtccaaggcactttctgatgtgcaacagcaggacaactttgaccgtgctctactgcgggccagtagagaagcagacgaggatcagtttgatgattctttttccgtccacgacgaagacgaggattcagacgatgggttatccgatcacgagcgagccgaacaccgaaaaggcatttttcccgccccgcctgaggatcttgcggaagatgaaggcggcgtcgatatgaacgccgagggcgacgactacgctcgattcctatcacagattaaaggtcggaatctgaccgaagtgcggcaggagatcgacaacgagatcaggacactgaatcagcagaacaagattgcaatgcgagactcggaggatatcacacatcagatggtcgcgcaaatccaactcatgctacggctcttcggtataccctacatcacggcacccatggaagctgaagctcaatgcgcagaactggcccgattgaatctcgtcgacggtgtcatcaccgacgataacgacgtgttcctctttggcggtacgcagtgtttcaagaacctgttcaacgatgcgaaatacgtcgaatgcttcattgcaaacgatctagaccgagaacttagcctgaatcgagacaggctgatctcactcgcataccttttgggaagcgattatactattggccttcctggagttggtccagtcgtggccatggaattgatggcagagtttcccggtccacgcggattggaagatttcaagagatggtggcttgaggtgcagctgggcaaggatgatgtttcgatccagaccaagtttcagaggactttcgtgagtctgagacaatacccacacaaatgtccgcacagttttaacgaaagacttcccctccacgatgtagaagaagaaattttctaatgtgatccacatcgatcccggatggcccaatcctcttgtggtaagccatctagcccaagattgggaagacatctgtcggacttaaattttccctcagcgggacgcctatcacaatcccgaggtggagtcgtctgacgagccatttcattgggggttcccggatctgaacggtttgagagggttagcaatcctcgaacggaacacctgaattgatcaactggggctgacttatcattgaatcatagatttctgcgcacagaattgtcctggtccgtatccaaagtggatgacgagctgactccgattgtgcagcgtatcgcaaggagaggacaggtgagccggattttcagatccttgctatgttgtttgctgatcggcgactacttggcaggccggggcgatgaacaagcagactatccttgatccctttttcgatgcgtcgcttggtaaaggcatgttcgcgcctaggcttcggacgaaatacccttcgaaacgactgcaggcagtcataaaaatgtttcgagaagccgaagcccggatccgtggcgagaacgtgccggaacgcttcggcgagatgttggctgatctcgaagatgagccgctgcgggaagtcgatcccaacgagacaaatcagcagctgggaaagaccaagcctgattcgcccgctgtcaagcgcaaggtttcaggcggcaagaggaagaggacgagcgccggcgaaggggaggagatcccgaccgtgccaaagaaggcgcctaggcgtcgcaagactcatgatagtgaagctgcggacaatctaaacgacgaggatgtcgctgtcggccgatccagagcatcatcaaacgcttccactcgggttaagaggggcacgtccagtcgaggtggagcgaaaagcggtaccgacaaaaggacacggtcggcccgatctgaaacggggaccagtgctgcagacgcagatgcaggactaacgctcacgggactacagcctgtctcgtcgccacttggagatcaaggttacgatcaactgttccttgagatcgcaagcgatcccgttgaacccgaagacgatcacccgatacgacctaaaccaaggcaagggaagaatgcggggggacctttctagctcgggcaaacgaaactgtatcctaaaaccccatgtagcacacacacacaccatgaccttcatctatgtagaaggattttgtggtcatatccaggaatacacgagcagatgattggttcgtccgcttgtcactgtgccaacgctagtagggacactctgatcttcaaacgagctggagagatcagtctagagagtctgaaggggggttgactgaggtcatggtcttttaattacacagactgcttcaggttttcgcacattcgactcgcaatttgcccaggcgggggctttccactttgacttggttgcgatgctcgtctgcgaacagaaatcgttgcacaaagattcttacgctacgcctgagtgatccgcattcctgagatcacaacttcgttgacggacacctcggatcgcatcgttcgggtcactgggcttccgatgttagcacaacgcgtcggcttcatgcaccgagaaagctgatcagacggcccgtctagaaattcgtgttcgatcccggctctcatcttagtacaacgctcctccctcatgtttgatcgcgttcacgcgttcaagcgtcttcctcgatcgactcggcaattccctatcaattgacgtctaatcagtctccaagactcgagcgatgatacaatcacagattcgctcaccttgggagtctcagcacttccaccgagctcggcttcgagtccgttgtaaggataagacctcttagccgcgggggactccatcttggtaaggtagaccaggtaaccgaatccagccatggcggagaaggccatgagcatctgttggattgcagacacacggaaacaagaccgtgatcagctcgtctgcacaatccgatggagggaatgcccaagaccgaagcatacctgggtcaaagcccagccggcaggcatggggtgggcgtcaggcgaccacatagagagcgcgtcttcttgctcgtgcaactgtatgcgtattcgatcgaacatcagcggtttgtaccggtttgataccgttcgagctatgaccagcatcactgacagtctcgccaaagttccttcgctcctggttgtcccaccaacccttcgggactcgtcgctgcagggagacgtaagggagctcggggtatccagccactgagaaacgacagacggactcagcccagcctgaatacactgagatccacattgtgatgatgaaattgacttacgctggggatccggaagagcaccgggttgtcgtgacacctcgacgacatccagaggctgcaggggagtctgctcagcccttcgagcagaggtagaagcgatggtccgggcttgggtcctagggagagctacggcggctcgtcgaagagcagcggatcgagaggcgaacatgatgtcagacttttgaggaggttctacactcgatggtagcaaatggcggatatatcgacctggtcatgttgaacgtctagtatagtttgggtcgattgatctcgttctcattggaagaagctacggaacgcgtcgagtctacggtcaattgtagcttcaggaccggtcaagagcgaggtagggaaatggttcagctagcatgatgatgacatcaactcgaatcgaaatagtctaccaacacacatgcacatataaactggttttggaatcaattcgcagattcaagatggcaaagaatgccaatccggtggaagcgcatcgtaagtggacagagaccgctcaaccgcctgctcaagctgatgtattcgaaaccttacacctacaggcaaggcgatgcgcaaaaaggagttgaagcggaataaagaagcccggacgaagacaaaagaggttatcactcttaagaaggatacgggtcaactagatgcagaagtacggaggctcacacaagctggtcagtttctcgatcggcacgtagcagctcgagcgactatgttgatcccgtccgttggcgaaaccgtcgtacagaacaagccaaagagctagacgcggctggcctggcccgtctcagggaagtcaaggaagaattggaacgagtcaaaaaggccaaagccgattttgttaaagcaaacccggatgctgaggatctcgtctacaagcgggaaaaggagcgggaaaaggccaggcaagctgagaggcagcccagtggacaaggcgatcgatctcgaggtggtccgggagtgtcaatatatggaaagaggagcgtattctatcacgaggtcttgaatccccttggacacccaccaccagggatgtatgaccaagaacgtcgtgagtctggcgtcgtcgatgctagcgtattcgaaagtcgctaaatgtgtcgcatcatggctcagcttctgacgagatgtttgatgcttcgtctagtgacggcgattccggtatgttcatttgtgactgctcgctctcagccagccaagacgttaaccgtctacatctgcggacctgcacagattccgatatcgtaatgccagaaggcagtccgtcaggacatggaaacggcgatgattcggactcggatgacagcatcgtgatgcctgaaggagatgctccacctgaggctagactcgcgcccccgccaggtaagctgcaatcgtaccgaacgtggtcgatatctcgctcaccgcaagatgtcataggcccacgtatacccctaatgacacccgcaggtcctcctatgtttgcaccgtaccgacccgcttacggccatccaccattcaatccgaaccacaactttcgaccgcctcactcaggattcggaacgggatcgaatcatatgccattacctccacctgggttcttccccaacaatgctcgtccacaacacttccagccgggcttcaggccaccacatcttcgaccaggcgtcgttcaccaagatcctctatcaaatgtcccgcacacgacttttcaggctcatcaagtggccaagcaggaagaagcggcgtccagtgttgacaaacctgcttctgtcggcaatgctcctcctgtcgctgccgtgatcgaagcggcacctcaaattcgcgatctgcgcaaagaggcggctgccttcgtaccgcgagctgccaagaagaagaagacggctgcggctgtcattcaaattgatgcggctccaccaccagagtctcagccaggcgagactttgcctgagaatcagaaagcaatagcagctgcagcagatgagacgccagcggcgcctcctgctccggtgtacaaccctgccgctggaggactcatgggcaagctgtctggaattctcgtttccgcgcctgcaccggccaaacccgccgatgactatcagtccttccttgctggtctcgacaaattgcctcaatgaggatatggttgtgacgaggatgaaggtggttcgggatgaggatttgtatcgagtcccggtgcttcgtattaattacgccccgtgtgtccgatcgacacagattgctaccgtcatcggtctgatggtcaccattagcaggcctttcgagacggtctcattattcgatagcccgttgcagcgcatctgaatcgaccgcacatctaaacgaagagaggtatcccagtcagatcatcggactatctagtatcaagccagcttgtttgcgtcgaaaaagctgcaagatatcagataatgcaaaaaccaactgtgcttgctgtgtcctttcgagaccggggtcggaagcgagggtgggtctcgcgggtctttccggaagtatattacgtaccgccttctcgcgcctcgtggcctggtgaccgaaccgccgatgcgtatggggtggacgctcacacagatccgaccgagacgatcgctaagagaccaaagtcgaggaaaatcgattcggtcttgcaagacaccatccttgaatatcctgtatcataccgctaccgtgctagccattcgtttccatcgaatttgtcagtctcgtaccgtgctatcgactaggcgtgctgcaagagacaccatctcaaacgacctcggccatatccgtgtttggttggaaaatcccgggtgcagtgagcaatgacaggttctgaagtgcccagtcagttgggcggcttttcgacgagtccttcaacgagtgcacaaggaagaatcctgagccacgatggttcccctttgaaccgggcggacgtctcggaatcgagcaagaacgatgcgaaacgaaggcgggtctccacaggttcgtcctacctctttcgcacagctcgacgtcggagaaattccgctgaaggtccgtactgccaaattttcttacagggtgcttgacctgtcgacggcgaaaagttaaatgcagtgaagtacatccgatctgttcgcagtgtcaacgattaggcgtcgagtgtgtatggagtcagtccacctctggccgagtggactgccaagtcggcggaatctcgctaaccatcctatactctcttcgacggcgcgcagaagacaatcaacagcactctaacaagtccacacgaccatgtcgacgtgcctgcgatcaatgtcgggtatccaaggcggcttgctctttccacgatcccacgtgcacgacttgcgaacgcaaagggattgattgtacttggaaactctcagagaaaggatcgaccccgcccccaacttcagctccagctacaggagatgaactcgccaggatcgaacccatcggatcaagtcggcccatcctacatgatggcaacgtgaagaagctcgtctccatctactttttccgagtgtataacgtgtcttggtgattgcaactagtcaagtggacgaagctcggcggcggaagcttatacgacttcatcctccttggcatctttaggcatgggtttctccatagggcttctttcatacagcgacttcatcggggacagataccccgacatctcttgacatccgtctgtctcgctgcagccatcgtgctcggtctcgacgccgaagactgcaaggcccggcttgcggactgtcaccgccagatctcggaagccatcgtttcgccaaccttggatctgctgtgcacaattcttaacgtcatctattgcgaattcgctgtagggcggcgatcggccctgtggatgttgtcaggaatggcaaataggtgagcagattttcgggatcaaacgacgccattactcatctgatcgtttcggctcgcctgtctcgcgtattacccgacgcgcgctctcagagtggcaatggcgcactcgctccatcgacccggcgacgagagcatgccaaacggcgagatccggcggcggctcatgtgggcttgttactgcatcgacattatggtcactggcaagcagaccgagttggcctccttctctctcgatagaatcgcggtccagctgcccatggacgagaggtcgttcctgttgcggaccagggcgacaacgcggatcttccgattgccctggacgccggcgaccgatgtagaacgggcaagtgaagggttgccagctcaaggggtgatgcttttcgcaatctcgcagagtgtactcaagtgagcggacatcgccttgtaggttcttcagctctgccgctgatggagattgcagataccttgcagtcgcgcaatgggagcaaccagatctccctggatcccaatttcacgcttgccagatggacttgctagcttggcgcgacgcactgaatgtcaccctggattgcacggaagaaaacgttttcacgagaatcgagatgggtcaagctactacattctttgcccgtaagccgctcgggccacctctactttttagctcggctgacacgcggtttggctcgagtatagtccacatacgatataattgggccatggctactctctgcgcctcggtactccggcactcgaatgaaatggtctgcgtcgaatggctgcgccaaatcattgccatttgtcaggagtcctggctcagtgtcgccgacgtcggcgataccttgctcggcgctatcccggagttcgtaccagaggaccctacacgtgaggttcgattggaattgacagtcaaattgaaattacgctgacgcccaaaattgtggaagcagtcttagagttaatggctgatgcggttgcggcccaactcgacgatgcagtgcggacaggcttgccgtgcaattccacttctcagcaccggatccagaccagtcttacattgatgaagcgaaatgctctcctcttctccgggtccaaggagacggtaggcgccagttcaacggtcgtcggcagtttacaagttggagctgatctgcctgttcaatctgtaacagatggtcgaatttattgatcgtcacgatactacattgcgcggggcgatcgggtacagacctgtcgaacagatccgtcgcgacctcgacatgcgtgaagagccaagtctcggttcatcggcgcccatgcaggcgacaccatatatactggaaaacatcatcaggaatcttcaaccgagctccgcgacactaccgccagtcaaccagtttgtcagtgggactccgaatcagccaacgcagcctgcatttctcttcggtatggatgcgagatcagacggcgttccggatgggatggcttcaaccggaatcttcgactttgattttgacctcccagcttacagcttggaagcactggcggatcctacagctaatctgccgcaattagagcacatgatggcatgctggaatggagctggggtgggaggcggggacatgtggcagatgtagacttcctgagaacatcagcgttgatacgatctagatactgtgcatatcaagatcctcaaaagccacccaacatgtgtacctagtgcgctaaatttatatccacaaggtcaatgcaagatcgctgcgtcggtatgtttcagcgtggaccgcactcgagctatcatttgggacagcaatgttgtaaccgaggacatcctcgaacatgcaacacagttcttcttcacccaccaagtataagccgacgtatcatgtctagttaatagcttggaatttaatagccatttgcgacgtcaagcacgtttcgacgtctggtccgtatccagtgtctcaacgtcaattcaagggagtcgataaaagaaagacgttcggaagcagaattgcacccgaggacagtgtcgacgcgtgagaaagcgaataatcgcgaccttctgctttcctcccgtgttcccccgaccaagcaaccagtcgatattgacaaatgacatcgagacgagatgaatgtatcgatatgcagtagagactgaatccagccaactctcatcaagtcgatctcatcagacaaaatggatttcctcgtcaaccgtgcgtcatttccgaattctcagaatcagcatcgcgggagctgaccggtcgagcaattgtactggaattgcgctgcttctgataggtcccaaccgagtcctcgagaagcagaagtacctgcaatccttgtccggcaaggagatggtcttctggcgaggaactagatctaagatctacgtcagtgagtatcggccgcctgcgcggcttcttgatgtcacagaacaggtcgaagttgcagatcactgatcacacgcatcttctctcctaccctttccgctcacgatgctcgtccttatccactcgtcagccgcctactgtactctccttggagtctcactccttggaaccggtactacccttgtccgatacgccttcgtaagcttagatcgtttctgactagggctgggtgcgtagagcttacgaaacatggaatctacccctattacgttcctgcaacccggatggtctcctgttttcgcccattgctggaccctgttgtttgatcatctcctggaaaacctctcatcgttgattccggcaccaattcaaaatcaacttttcgaccaaatcatctcgaaccttgcattcgtcaaccgaccgactcacactcgcacatggactctgcatgggaaaccgctgtccgcctgtcaccattggaccatgcctttggggcaaatagggtaccgctcccaagaagggcgagcccgctgccgagtagaggatcctcgagctcaagcaaggttcatagggaagagaagcattgtacgatgatcatgccatgggatgatggcaggcgtgacctcgctagcggtcggaatataaagaaatacacacaaaactcccaagcctactctctgaacggaaattctgcgcagagtaccaagtaacctgtcgccagaatgagcacgtggttaggtccaggcccgctgcaacaggtcatatcgcgaccaatgttcttctccatgcccgcagcacacctttcctcgccagccgattctactctcatgaagtcctccctgttctcgtctcagcggtacgcctcccaacttcctccccagacacggtcacgggcacctctacgcaatcgccgttcttaatgttctgtacaacaaagttcgccggagggcaaaatcctgacgccttgtccgtgatcgctgtcacagatcctctgatagtccaccgggggtcgggggtcgatcttggtaaaagcggcccctctctggccaaacaagtccaaaacccgctcatatttcttgagctcggctcacagatgacaatctcgttctcgttagagctcgtccggccggggattttttgctcacagaatcctcgccctctcgcaatccttcacagccacagaccgtcagatatcgtacgcatgtcgtcgtcaaattcgtatatatatacacgtcgcattgtaatggtgaggagacgtgaaaagctgtctcgcggcctgattcattcgtaagtcgttaaatagccttgcaaggagcgacccaattgatcctggactagatctcaaagtccgaatcagagccatccacttcgacgtagacctgtttcttagccgctggtcgggctcgtccaccggttgttcgaggggctggagccagatccaagatactgcaaatcaatatgacatcaacggctgctagtctcgatgctataccacgtgcagcttacgagtcatccatgtcgaaatcatcatcgtcagagtcttcagccttcttcttgggcttaggcggtgctgccttcttagccttaggtggaggtaaatcagactcgtcgtcttcgtccgtatcaggtgtcttcgtcttcgatttggcagttgctgcctttttgggtttcgcaacagcgatgtccgagtcgtcttcctcactctgcaaaatcgccttcttgggcgcagctttcgccttgacaggggccttggtgacctttgaagttccgacacgtggcacgaagtccatctcttcatccgaatcaagtttcaccttgctggatgacgctttcgcaacggggatttgcactgtataatctgtattcgaagattcagtatggccgcccatccttgggacttgacgggtgactgaccatcgtcgcttgcatcgtcaatctcttcatacttcgtgaccttcggcttcgggacgggctttttgcgcactggttcgtcgtcactcgaacctattgaggctctatgggtaaatcaaaaggtaagcgagcgatgcgagcgatctcaatcgtgtaaccctacctggatctcttgccagctgcttctgcttctttgaaaaagtcctcgattttggcgacggcaggtttcgctgcgacctttggcttcgcgggagcccggggcttagctgtagtctttgcctttacgggcttataatcttcctcggagtcggagccgcccttgataccgagtttgcgccctgcgactccgccctttttcggcttgattcgcttgctgttttcgacatcgctttgcagcatgttctgtgaccaagacctattagccactcccttccggaaactcttgaggcacaaaactcacctgccactcaatcaagaaatgctcgagatcgttgttccagatatcgatgggtgtcagcttgagcaatgtgacaagctcggcttccttttgatccctctcttggatcagtttctcgatctaacaggaaggaacagcagtcgtgatcagcatcacgaaatgcacaagcgccttgatcaacgatgctaaccttttcgcgtgtcaagctccaaatggccattcccagcaagtagtcgtaatcgccggctttcccttcatcatcttcttccaggaaagtttcatcttctcccgcctctttggccttcttcgttttggggaagggcttgaatttcaaggcacgcagctcttcctcgagactcgatttcttcttgttggaaacaacaagggatttgtcgacaatcatctggacgaaccgagcttgattcgaaaccctatcaaactgcctggtgagttcgtctgcgagattttgctataggtgataccggtgatcagccagaggtatccccacgccctctaccccaacgggcttgcctttctgatgccataatactccaaacgcttgtggtaaaagtcttccaaaatctcttccggcgaggtgtacttgcggatctttccgttgagatcaaagcacaccatgttcgcgatgctaatggtcgaagtcatgcggaaccgcttttctaggccttcctcttccgccttacgcatctctgcctcggtcatagtaatcacgaagtgaacggaggtatcggtatggtactccttgtaatcctggatgaacgcagaatttgcgtcagacggtcgcaacgtgctgaaccggcgggattcattcaccttcaaagttgagttaatcttctccgtcccgaccacccattcttctaacatctccttgtagtcttgggtccattttcgcactggcaactcggtgatctcaatcgtagtgctgtcgattttggtaaggataccggtgcacttgaacttgtcttcggcaatcctttcgatggttccctgtcgacggttttgcgctgccgttagccaacgaaattaagccagtcggacaggacatttactttgaatcctctgtaccaaggggtcatggcctcgagcggttcattctgcatcaatctacgcaagttgtcgacaatgtcgattgggttgtagttcggcacgtaagtgctccagccggtaccgataccgtcggctccgtcgatcagcaccaaaggcacagtcggcaggtagtattccggctcaatgctcatgtcgtcttcaatctgatatctcaggatgggatcatcatgagggtggaagattgttcgtgtgattcgcgggatactggtgaaaatataacgagcgctggccgcgtcttttcctccctacaagacagaacgagttgaagtcagcgatattcaccggacagatatctaagcgatgctcacagaattccgggtaccgaattgaccgctcggctccaacaagttgatgttattgcttccaacaaagttttgggccagtccaacaatagtcattgtcaaactgacttctccatgatggtaggctgtcttttccgacacgtatccggccagttgtgcgacctgatgcaggaagtctcgtcaggcagtattaaaccataggagagatcgaatgagcgtaccttgatttccttgacgaggttcttcttgaatgccgcgaatacgacctttcgctgaccgggtttgagaccatctgccatggagggaatggaacggatattgtcggccatcgagaaaagaatcaactctttgttgataaagtccttgatagggactcggtcgatatcatggtctagataggtaccaggctagcaaccccatcgacaaacattagcgcgtgggactgctcgaaacatctacgcgctgcataccttgaattgccttaaccactcctttcggtcatctgcttttttcttgttgaaggccagatcgatcaattctcgatctccctgctgcgtctccaagaaaggtagtttgtgctttggcaagtcgctaaagtatttcttcgcatcttgagcggtcgaagtacccagaccctaaggaagtcatatgagtcagtttgcatgaccaaagcagacggatcaagcaagaagctcgaaccttgtagtacttggactcccatcctttcccattgttgttggcttccttccactcttcatattcgggcatggtataaaaggtatgaatctgcttgcccttccataccttgacgatcggcgtgataaactcgaccaagaagttgggaatcttgagcaaggatgggtaaaagtggtccaaaaagttgataatgagccccttgatatgcgagccatcgtgatcctgatctgtcatgatcatcagactaccatatcgcaggccgtcgacgctcgtgtattccgtcttgtgcttcagacccatgatctgcttgatgtgctgaatctcgacgttcttcagaatctggtcggtagcggcttctcgcacgttcaagagctttcctcggagggggaagacaccgtaattgtcacgcccaacaactgatagaccagagactgcaagagccttggcggagtctccttccgtcaagatcaaggtacagtcttttccctttctggaaccggcattgttggcgtcctccaactttacaataccggagatacgcgaagtcttgactccgtccgattttttcatcatctgatcggatttgaatttggcaaaactcaagacgttctccacgattccggtcttggcgactgtggaacgatcaagacgatattcagcgcgagatcgagcgtaggcgaaaagcttcgacgttacccaccctttttgacaaagtcttcgctcaagctaagcttgcttccaaaagccgacggctttagggtcaaggtctccttggtctgcgagtcgaacgcagggttctcgaccagtgcgttgacgaaaatccacatgtggttcttgatctgatgaggtttgaccggggccgccttgttcttcttcttgatctgctccatcaaggcggtggatagctgaccggaaacggtgtcgacgtgtgttcctcccttgatggtcgagatcgagtttgcaaaagagacctgctgtgcttgaccgtccgagagggcgaatccgacctcccatcgaccgtccttgctgacttcatagacgactgccggcttggtaatcgcgcctccaccggattcctcttcttgctttttggtcgcagcggacaggtacatctcgatgtactgcttgaagcccttgatcttgatccgctcgtcgttcagaaaaactttgcagtccttgaccgttcccgccatgtcatagacacgcttcatcagcaaagcttcggtatcctcgtcgatcttgtccattccaaatcgaggcaggtcaggtttgaaggtgatctttgtgtactcttcccccttcttgttttcagtgatctataccgagaacaggactgtttagcatggatcatctattcatgctcgagtccaaggaagaaatgcataccttgggtacccccttcttgctcatgttgtcggaaaagacttgtttgtactttttcatcgtgttcttatcggcagtctcgacgactgtatgtgatgctttcgcatgagcgatcgcgctcttcctatgtagcggatgatggccgcgctgactgaattactcactaaattcggtcgaatagatgttggcaagcttggctccgtaaccgttccttccgcccgtcattttcttctggtcgtcatcataattggaagaggtcaacctgtaaaggagcaatactagaaatttcagcttccttccgcggcagctacaggaaatatgtttgctgcgtacagattaccaaagatcagctcggggatccagatcttctcctttgcgtggatttcgatggggatacctcgaccgttattgaagaccgagatgacattgttctccttgtcaatattgaccttgaagctgtccatggtcgcgtcgttgatctatcattcgaaagagaccgggattgtcagccgggaccttgtcgaaaaaatcaccctgagagctgactcgccttgttatcggcggcgttgaccaggatctcgtcaaagatcttgaagaaaccgggtacgtagctgatggtcttctgcgtcatccccttggtctccctatcaaacacccagagctgagcttgcaagtgctcgacggatccgatgtaggaatcgggtcgtttcaagatgtgctcgagttgcgatagctgaacaggggcgaacggaatgtcaacacccatcgttcatccttgcctttggctagacgtccgagacccaccttctggtacatctcactggcggtcttcttcgggcccgagccggacgccttggccgtcttcttgaccgagacttctccatccgaattgtccatatcgatgtcgctatctaccgggtctgacgcatccggagaagcctcgtctacgctctcgacgtcgacatccttcttgttcgtcttcttggctttaggtgccgccttcggttttgcagcagcttttgctacaggagctttctattcaccggaagcagcgggtcttttcagctcgtcgacacgaacgaggaccggtcgtctgtgcttacctttgctttcggctcggcagcaactttggtagccttggtctttgcggccgtcttcttgaccgggagttcaaagtcggtaccgtcactttccatgtgaaaatcgctctcctcggaatccgacatcttgcaagaggtcgcgatcgatcgtgcaagcaaggggattggcgtcaccggatgtatcagcccgtttcccgatgggtttcgcaggctagaagttatccgtgatgtttcaggttcaggaaatcccggtgcaaggaagggtcgactagacggactcgagctcgaacagcgggcgactcgaggactcgttgaccgcagaacggttctgatccccaaaagactacgccagacgctcagaatgagatgctggcttgtggagcgactgaaagaggtcttgcgaatttactataacgattggtgggtttgtcgagttgggtgttgatgtcgcggcagacctgatcgaccaagtgcaggttgtcgcccttgagtagcatgagtagcagcaggatgagcatgtttgtttgtttgtttaccttttgcctcgaagggaggaatcgaaatcgagactgacatgttttcgattgggagacgtcgcgctagctatagttgtcaggctcacggctgtctgaaacgccgccgctattcagcgcagcctatgagtcgcaaaccaagtatggacccagcacgaccctctgcagagtcaaaggcctttacatagatgatcaggaggtgttagccttgtctgatatgtctagtagtagaatcacgaccaacaggtaggagatctacaggagtcccgcttcgcacgctgtgtgactgtatcgctgcatcgtgattgtcaggagtcacgagccttagcacagctcaaagggatgtgatcatcagctcaaatctcacatatatacggatagcctcactagctctccaattcgcctcttactcctgatccctatctccagaagtctcactcagctcgtttctcgcctaccacttgaagcgtcatgtacatgcctcacagttttccctgggggatgccctacccccctcatccgatacatcaaagtcccgggtttccctacaatatgggcgccacccccgaggtagtccccggtaccacgaaaggggcccacgcagcaatgaacacgcagaattcggtcaggtcggccgcgtcccagcgaatgtctcaagcgggcatgaccaaccatggtatgccgcccgcaagtatgccagttcccattcatccgggaatgatgggcatgggtatggggtacgatcctcgaatggcgatgatgatggatcatcctggcgtgatgtctccctacggaatgtacccggggatgatgaacgggatgatcccaggggttgaaggctccgactccagcacggccagtgaacccgcctcgcccttgcctcaagtctccaagacgccccggaagaaacagggggtacgcttcaaccccgagcacatgaccacgccagtccctggccatacgcctcctcagctggcccctactcgaggtaagtgatgcatagattttgtaacaaatccgaataccctgtagcacagcctgacatttccgccatttgaaggcagctttcgatatcccgcacctcctggagcttctggcccttctaccgcttacacgagcccagcatcgtctgctctgccgactccttccacccattcttacccaactcagggtggctgtgagttaaattgtgtccttcaccaatacagctggactcattctgcttgcgattctcctgctgtcgcaccgtcagatttcacttttgtaccctacggaacaggctcagctcagccatcccctactcgagctactggatcttatcccgctacacccgctgcctataacgctaagactgatccttttgctatgcaagcgatggctagcgccatgaatgaaggccctgcaggagagcaacaagcgcatcgacccgcgttgtcggattcgcgatatgggcgtagctggtatggcggtcgctaactctattacaacgggtcaattcgtggtcgggtcgttattattttcatcactgtagactatgctgttgttgctcgtgttgtaggccatggcgtcaatgtcggttatcggaatatctcgtgttgctaattcagtgctgtcgttatgcgccgccggatctgttccagcgtttcggcttcttcgttgtcgtcctcgtcattgctcgtcatctcacccgagcataccatttgccaagctttctctgatttaattgatcggagcaccttggcagtacgttcgctatacccctcggcagagaccgaccatgacattacgtctgatagcacaaggactgggtttcagtagggccgggaaggtgtgatcgagatgtggactaaccgagctcggtccccttgcaagcactcaagatcgcggccgttctggcggacttgtgttagcaaatgaagctgatgcgatgggtgaaacagtaatcaccttttttttgctgtaacattgccatgggccgcggcgaaaagacggtcccagacatcttctgtgaggcggttatgcatagctttgaggaccgcctttagcgtctcggtgcgcaaagccgtctgtttgcgagtgaggttcaggatcgagtctggccaaacaggctcggtcgtaggcaacttaccggtagcttctgcgaggccgacatctccactctcagactgctctcctcaatgtccaagtcgaacgagccttgagatacccgaaggtcatactcagcgtacgcacgaatattcgagacaaggaagaaggggcatgcttacaggtttctttcagtttgcgactggctctttgcgaaggagtgatgcgtggttgtgtcatgaagggcgtcttgaatccgtgctgagacccgatgcgtctggcagcgaccgtgtacactatgatccaggccatcagttccgtgcgtgggtaaggcatcgaccactatcgtacagacacttacctgtagtggtagcagatggcgaagctgtgtatggacttggcgcaacagttctcgactttttggctggaggctcggatcgttcgacaatgacggtgtctcgctgctgcttgggcgatttctctaattgccgtcgagcaggtctttcttgcgcgaccgaccgagggtttgcttgcaggccgtgtccaagatcagagtttccaatcccgacccgagttagcacaggcggaggcgccaggtaagggtttgttactggagcaacggccctcgcccgaggtatagaccgcacgggcacaggcggtggaggcatcagggcggcgagcgtgtcattcccccgaaaccgaggagctgggggcggggtagggcttctgaccgggggagtaggactccgacgaccgtagaaggagaccggatgaacgggatccagatcatcgcggtcccttccttttctgaacgggatctgagacgacaccgcgacctcgtcggtaagttgtttggcgcgagcggcgaccttttccggattcacacagatctatgaggcgagacgatcagggtcgaccacaaggggcattatctgctcagatccctgtacccacatcgcacatattatcgcaatagttcttggccgtgctcgggttcagctcgtcgatcttttctccgaaataccggcaaatcgccacgtgccggcacaatgtcgtcgattcggcataatgttgcacctgaaggtcgatacaatttagggagacgcgatcgctgcggacggcacaatcaatactcacctgcttgaagctatcgacgccgctatgctcatccgattcgtcctcatcttcaggccgagcgttcttagtctttttgccggattccatgttgaccagtcggcggagtctaacggcatcctctcgggctgggctcgcgaaataagggcgtcagtcgactcgtgctagctctggaccgcgaatacgacttacaatagtatagcagacaccttgagatctgcgatgtaggactgtcagcaaggttgagatctcagactcagtaggtattcacatgtccgtctcttccagctcgccctgtttcttggtagtacccctcgaaactctttggcaggtcgactgtgatggggcgatgttagccatatttgacagggaaaggctcgctaggacttgcaatggaccacgtatcgtacgttcgatttatcgataccctagaataaccgattatcagcctgcggatacccctcatttagcgtccagtcctccttaccattccaaacgcgatcgtagccacctgaaagacgtttctgatcaacgcgctgcaagcatcacgccatccgacatgtctccaacgtaccacacactcgacactcccatccagccattgctgcatagtcttgtccagctcggcattcttcagtccgcgatgaaaaggtctcgctcgtatcccttcatccctgagcatcgctgctacctggtcgcactacagtatatccaggggggaaagaatcagatccgggttgaggaacgtgattgctccctgagacgcaccatcgcacgggctcgacagtagatgatcccagataccggcgtcctcctctgcggatccaaagggtcaaccggcgcctttttcgcaaacgccttgataaacatttcgacatccttgatccggtactggtcgggttccgggcgatgtcggacctgccatggcgttgacatcagcgagacggctgcattgggccttgcgcggtgaccgctggcttacctcgtaatacaggttggtccgattgaaaggctcgacgcagcggtacaagtgtcgaggtgagaggcccagctgggcgatgatatctctctctaccgccgcggtcgccgatgccgtcaaggcctatacaaaaaacagtcccattgtgaacctgtgtcgggcgaaagagcttggacatatagctcccagtgctcaccatgatggggatgtccggaaattcttttctaaaaaaccccaatttacggtattctggcctgaaagagctgccccattcctacgttctcatcggaactgtccgtcagcgtactggacggattctgctctgccgaagctgctcatccatgctcaccgagatgcaatgcgcctcgtcgacgaccagccgtctgagttcgttctgtgcgacgacaatcttgatgctcttcaaaaacttggggctgaagagggattcgggtgtgatgtacaacagtctcgcatacgggtgcccggaagccaggtccttttcgatctgtcattcagcgaatgtcgatcagccgatgccctacggaaaagcccatgaggagctaacccctatgatcggacctacctcttgtctttcgggaaaagtagcttcggagctgaggatatgcaccttgaccccgtaccccctcagcgcctctacctgattcttcatcagcgctacctcccgccgacggatccagggccagccgaaagccgatcagccagggatcgagatctccatatcgaggaaacaatgctcacacaacaacggggagatgacaatcgtaatcccatgcatatcagcaactgcaggaacctggaaacacagactacccccggtcgtcgccacattcccagctgatattcagcactggatgtcgatcacgcgttcccagctcgatgacgtacctcttgcccatccccgttggcgcgacgaccaagacatctgctccgtgcatggcagcttccatgatctccttctgtcttccccgaaaagaaggtttaccgaaagctatgagaggcgggaaattcatcgaccacggtgtgtcagcggccatagatgacaagttgggaaagctaaccatgctggggaaaccggctcactggtcgtcaagacccgcagacaatcttcctgattggaagcacttcgtcgtaactgcctcggtttggagatggcacgggacacctgcaaagaatatttgagaacgatgccgagacgaatcagccggtcaagtccgacctaaagcagaacccgattcgcaaagaccgctagctacctgcgtcggggtttccaggttgggataacgcgatggtacagccggtgtacccaggatcttcggcctttccttcgtctgcttcctttttggtgtggtcatgtcatcctcctcgtgttcttcgtcggattcggtatcgctcagcttgtcacccgatgagtgaatgggcgcgcccacggcgggaagtggcgatgagggtggtgccatggtagtcgccggtacccgccagcaaaagggttatgcaagacttggatgatcgctagttatataggtgtcactacaagaaggaccgagctgatactacctgcatcttaagattcggccagggagacggggcagcaagccgtggcttcgctttggttgagaagcacgatcgaccatcgcgacagataggggaaactatgtgtttacgttgtcataattttgctgttcttaaagacacgtcatgttgacaatgcagtaaccctccctgacctggcatttataattatcattgatgatgtaccggtcaactccgaacgaccgggtaatggccataattcatcatcgatcgagctgaacatgacagcaaagaaatctctacgtcacggctcttggccatacaccagactgttatcacactttttgtagaatctccttggtcatcagtcgattcgccatctcaagcatgacgcccattcactttttcgatatcacctcgaaatataccggcaagtttgggaaccagacatggatttgcaccggtaaatctgtccccctaacgctcattcctataccgcaggatcggccaaatcatggtctcccaacacgtaagagtacctcaggaaaactgattgatctttggtcgtagcaatgcctgattgtgctaccgctcgtactctttgactatagcatgaaggtcagggtcgccctcaactaccaaggcgtcccttacacccagtcttacatctcgtaccccgacatccgacccatcctggaatccctcggtcacgcctctcagaagcccgatcatagcgaccagaccttgcctgcgatctaccatccggaatcattgcaggacaaagttccaggtgggcaagtcatgatcgagagcatggacattgctttccatctcgacgagctccacccggagcgtcccctctttcccgcaaccccgtcgtcgacgagggaaaagaccgtcgagctggtacaacatgttgctacattgtatcaaaagacctttggtgcgggccgggcgatgaagatcgccattcccaaggttcccacgtatttggacgatcgtggagccgagtactttctgcgaacaaggaccgcctcgcatcctcaaaagaaatcacccttggattggcccagcaaggaccctgaggaggattggagcgcgtacgagaagactctccgaccgatcgccgagttgctcacgcgggacgcttcggggccgttctttatgggcgagacgttctcattcgccgatgccattgccgtggcgcacatgatctggttcgagcgcggggacgaggcgtacctgaaacgcatctcgcaggtgcacggcggggtattcggaaagctgtacgaccgggtcaaggcggagggttggattgacgggcagggagaggaaagggaatggccggtaccgccaaagtcggcattgtaaggaaggaatgtggggtgaatccatcgggttgtaagatagcgatgcacgacgcagcctgtttctccagtccgagaacgttggtcgggtcagtatggggatgtgtcatttgcccttaccggtcagcggtcgtgtgagaatccaaccaatccgttcgacttgcgctactgcgatggcgacgcaacaacaccttgatgccgatccattcggaaggagcggcagcacagcaatcattgggcatcgtttacagtggcgttgtcaaaggaagccaaattcgtgatacctccggcaaaagacagattcagactcgaccacttgaccagaagaccaccttgagaattcccacttttacaaactcgacggtcgcacggacgcaagtacaccggggcctgactgacgtcaagctaaacgtcgatgggctggattggttacagcgcttatggctagagtatgctgcaaaactcgcagcgccaggcttggcaatttgattcctggatgatcctttctcctcttgtcacctcaatcttgacgcagatgtatatatgtatatcgatatgttcaacaccatccagtgcaaatcacagcgtttgaccaaacttgctctctctctttaggaattctatctcactccttcagaaatatatctcaaccatggcagccacccaacagcctaattcatttgcacgttcaaggcctctgttgcaagcaacattattgtttatcaatgtgccgctggagtttgcatgtatggagtcaaaggattcacgtggtgggcttctggttagatggttcggccttacgaccggtacgtgcaggcagcgcaattagatcagcaatctttgagaggctaaaccttactgcatatttgcatagcatctgctagggaagtgacctatttgacaattctagcagtacccagtgcacgggcggccggtacagaagtcatgcgggtgtcgtcgagtgagatagtcatgcactcgtgtccaagacatgagccattaatgttgacggcttgactgtaagggtttgcaaatataaatatagaaatcgagcacgaaggttgtttgtcggcctggccgtgggtagcgccctcctggacagcagcaagccaaacatcgtcggcgcgacacggacattactctttcaacaattaacaccccgccgcttaatccctgctcaacgctaacatgcaaggatagcgacagcgacatggatcattgtgtacctgcataaagatgtgcatcctttgtgttcctctaatgatacagcgaacggttctaataatctattgacaagggcgttacgggggcgttcgtgtctagacgaggctctgggtctccaaggtgaggatgatggctgaaaagaagggtcgaacagatagcagggtgagtcgacacactcgagaaagccgggtcaagggcgctgcacggcaagactcaccgtgaacgatctcggggacggtcatctgggtgagatcgacgacgagctcgggcttggcgggggtctcgtactcgagatcgacaccggcgaaacccttcaacgaaccatccctggcccgcttgtacactccacgtcggtccgtcttttcacagtgctcgatcggggtcgagacgtggacctcgaaaaagttgcccgacccggtgctcgcgacgaggtcccggacggcctgcctcgacttggccaagggtgcggtcggggcggcgatgacggcggcaccggcacgggagagttcggcggcgacgaacccgatccttcgaacgttggcgtccttgtcctcggccgtctcgtcgtcaccgatggcgcccaaatcctgcctgacggcctcgcccaacaacaagctgacgcttcgtccaccctgttgctgcaagacgacgctcaaagccttggcgatcgtatccttgcccgagttgtgcaatccggtgaggaggatgacgaacccttgcttgagacggggagggtaagattcacgcaagaccttgacgacggcctcgtaactgaaccaatcggggatggcggcaccggttcggagacgctttcggagctcggtaccggagatatcggcggtaggggtacccttggcgacctcgtctacgggctggtactcgtccgaaccgggcaagtaggtcatcatctggaaggggaccatctcgatgtgcaactcgtccttgtacttggtgacgagttcctgagcgtcgtaaggtccgtaaaagtccttgccctgcgagttcttaccgggaccggcgtggtcacgaccgacgataaagtgggtggcaccaaagttctttcggatgatggcgtgccacacggcctccctgggtccggccatcctcatggcgaggggcaagagggcgagggtggccattccgttggggtacttgggcatcaaggcctggtaagccctgacacgggtgtagtggtcgacatcaccgggcttggtgagcccgacgacggggtggatcaagacgttggcctggtgttgacgggccgctcggacggtcaactccctgtgagcccggtgcatggggtttcgggtctggaaagcgacgaccttgcgccacgagacctttttgaaatgagcacggagctcggcaggggtgaacctgatgtcgacatagtcaaagtgctggggaggctggaccgcctggactttcccaccgacgtaaaactccttgacgtgcttcctggcgtaagcgacggcggggtgggcggggtcatcagcgcccatgaccttttcagcctcgagagccttgtcgaatcggtaaatgtcctcaactgcggcacgtgggacgacggacgatcagtttcaaggcgttcgtccacaagcggagctcgtgccccttggcttaccggtcaagatggcgagagcggcctcgtcacgcgggtcacggagagcaaccctggttccggcagcgagcttcaagttgtcaatgtcctcctgagaaacgtccagagtgatgggcatcgagaagaggtcaccagacttgagtcggagggtgtctcggacgctgtcggcagaggtcaacatgcatgtcagtcggatacctcgatacgagagtagaaaacgcctgacgacactcacgactcgtagtcggcctggttcatgaaaccctcgagaggagagaatccaccgttgcagatgagctccaagtcacatagttgcctctggatagatagcacacatgagcgcgaaaggcagaagatgtgagcgagatgtacagcatgactgcgaaggcgaactcgatgctcacctcgttgaggtagatgtcggcgagacctcgagattcgtcgatgagctcttcacgcaagtgagcgtcacgagcgacgaggtccttgagctgtccaccgtggggagcgttggccattttgagaagagttgttttggaagtggtttgagggggaaggggatgagataggggtaagtctggatcaggcgagagtcgaggtcgaatattcggaaagatgtcgatcgaggtcagagtgttgatgtagcttgcaagagtcgatggtggcaagggtggctgggctgggctgagctcaaccaacctggtgactttgggtcgccgcttttctccggaaaaagtcgacgactttgggaataaaaccatgatcaaagtctgtcaaagcaattcccaaagattcgacttcggaagcaatttcaaggtcggccgcggaaggcggggggagaaggtgtgaaccggaagtatcgtgggtttcggaagtaaatggcgccatcccatcattcgagattactctgagcgcagctgcacacgcccaagaccctcgtcacgcgcgtcacgatctcgtcatctgcatccgcgtagtcaaccgtgcgcccgtatattcgtgtttgtttgctgcgaccaagtcgccgaggcaaatctcgccattgcgccgccagcttcgtttcaggtcgcgaccgtcccgacgggatctcgtcgggaaatggcctattcagatgggagattcgagtcttacaagggccgaatcacgggaatatcaacgacagaccgggaagtgccccaaatcgatcccggaggatcgggcgtatggcaatcgggaaaagatcctcaaacggatgaaatgcttgacagtgtcacggtggacggaaggctgcatcaacgtctactttggtcaatccacgacattgcgcttcacacgcccatgctctttttgcgagattcgaggcggtagacacctctcgaccctattactaaagccgtcaaggtggtgatttaggtcgagcttcggattctctttcgcacgaggccaagcctccgtgtgggcttgggctgtgtattgttgtactggccgaacttgtcacagtcttccgtagagaggctccaaagtgaccgccgagagcgcaagctgcttcgtctagcgatctatcccgcaagttcgaagcgagggcagattgttgtcatgatataagcctgcccgtcgggtacctcgagtggatatcgaacattcactgcgtaggctcgatctggtggcgacatgcacaggatccacttggtcgagaaggccgactttgatccaagccatcccaacggaaatttcggggtcgtcagagacggtatgaccattctatcggcgcttggcgatatgcgaggcgtagtgatggagatatttgtaataatactactgttcgatacgatcaccgagatgagagctcgaggcgtcttgaccggtggatcatggatgaggcaaattgacataggcaagagggccggaatctgggagctgaagcatgctcacaaggagactgtttctagggctgatgaagtcgagccgaaaaattggtggaaatcgcatctggttcgaacctcccacaagatactcacccgctacgtaagcctcggcacacagctcaccttgctgatgctcccacttcccgcttcacccctcgccactctagacagctcctcgggatcgtatcagatagtatttccagtgagcatggataccctttggcgagccaagcgaacagagtcgagtgtacgcgctccatcgattggctggtacagggattcagggtgatggggttggcgatctcggttggctcgccaaaaccttcccttcttgtttgctttacgtggccagttcgcgtcgctcggatatggccgagaaagtaaaacgagtcgatcgtgatgattatttaggcatgcatgatgaaagagatcgtttgacgtacagaacccccatccacgtcggactatttgctttgttcatcggcagcgctttagtaacaactgacatacccatataatcctccaagctcaaaagactgccacctaagcacgactgacagggtagtaagcgaacacatacctccataccctggcacccgaaagattcaacatggctcgcgaagctccccctcaggtgggcggtatggacattgaggcgtacgtattaagacaaaaaagataccatgttcctgcagtgcaagtctaaattccccaccttcaactggtctagattccgcaaacacggatacaaggtcgtcgatcagatctgcgattactatgctcgactgaacgacctccccgtcgtagctcaggttgagccaggctacctcgtcaatgatctacctagtaaggatttctttcctctccagacgatcgttcctgagttaatcgatattcccaacaatctggtagccgaagcgcctacaaatcctgaagacttttccctcgtggcctccgatttccagaccaagatcctgccgggcatcacccactggggtcatccgcgattcttcgcttactttccggccatcaccaactttgaatccatattggcggatatgatggccacctcggtctccaacccgggtttcaacgtgagtatgggcagggacaaatggaagccggcgtcggtactgatgcaagaacgcgagtagtggagctgttccccagcttgtacagaactggaacaagtcatgcttgactgggctgccaagcttttgggtctgcaggaaaagttctggaacagctccaaacaaggcggaggccagatcaccgtcagtatcacctcggcatgcctccccactcattcgcgatccgtcgattgactcgtttgtccacgtcttacgcgcgcagggagcggcctcggaatctgctattgtcgcaactgttgcggcgagagagcggtgtttccggatgctcagcctcaaggatgcacctcaggtcgatgagaagcacggactggatctcaccggcgaaaacgatgtaaagaccgacgcactgggaacgagaatcaacggggccgatggggatgtggatgatgctatcagggataagtaccactccaggctggtcatgtacggaagcactcagacgcatagtatcggtatcaaagtgagcaaatttatacagctgaaattgaatgtgccaatgcgggttctgacagccaatcacgctcggatcgtcgcttaggccgccaagattctaggtctcaaatggaagtcgctgcctacctcgaaatcggatgattatgctctgacaggcgagactgttaggaaggctttagaggaggacgaagccaaaggtcttattcccttcatgttgagtacgtagaaacacaagtcttccagcctggagctagcgaattgatttcgcttggcgatctgcaacatcagtcggaactatcggaacgaccaacaccggaacgatagatcgtttgtccgagattggacaagtctgtacgtcgggaagcgcatttcatgcaaggaacatcgatcggagtgagatgctaaagcgctgccagccaaacagtgaaaaatcacccgaccgttttcttttacgtggatgcagctgtgagcaatcttcagcaacatggtctacatgcattacagctgaccttgtgtcggctgaccgaccttctagtgggctgggaccgctctagctgtgccggagctcagagataccttggagctagacgccgttaacgaatatgccgacggaatctgcacaaacttccacaaatggggtttggtcgctttcgattgcagtgcgctctgggtgagggaccgaaaagtcttgacgaacgcgctcgacgtcacaccagcctacctacggactaaacacggcgatactggggtcgtcgtcgactaccgaaactggtctctctcggtgagtttccttaatatgctgcacaacggcaatgcacgtgctgacccagtcgcttgatccagctcggccgacgcttccgttcgttgaagctttggttcgtcttgcgtagctacggggtcgaaggattccgtgcgcacattcgcaaggtgagtcgatgaatcgtaggactcaagcttaatctgcagagctcctcttactgtctgtcttgcacagggagtgcaaatggctgcctcgctagagaagcgaattgaacagtcgcaggacttcgaggttgtcacgccccgttcgctcgcattgttggtcttccgattgaagcctgtgtcagggaaacacacgccagaagaattaaacgttctcaataagcgattgcaagcgctggtccatgccgaacaagacttcaacatgactcaaaccgtcctaccaggagagccagggcaaccgacaatcgattgcatgaggtttgccatggggggtttacgcacaaccgaggaagacgctttacaagcatgggaggtagtcgagcgattaggtagtagcattatgaatgaagtatagggttctgttgtatcgttgtagtatagtagaggaagttcaataacgacagcggtcgagtcgcggccggtcttgatctagctggtcggcttagaagccctgatgaattcaggcaccgggttcgctttgaaggcgatggccttgcgaagttcgagttctgccgcccatgcggcatcctgtcaaatggaaattcagtctactgcgcgcgtcgatgaagccggtcatgctattttctgaactcacctccttctcctgcttgaagcgtttcaatgcgtcttctctccgctgctgatattcccgattggccttgtcgaactcggctcgttcaatcatcctggctcggctcgtacgccctggggtcttgccacaatcaggtctagtcactctgggcggcgtccgcttgaccttgacttctgcggctctgtgcgccttttcgaagtttggaattttgacgatcgcagaaggcttgcgagtgatgccttgtacagtgggagccactatcttgtttgcgttcgacctgttggatcctattgtcggcaaatcgtccaatgcgatccgtggacgtgtgttgatgcaacgttcttgcctgtttggagcagaagtccgtgtgctgatgaggcgctcagccggccttgcttgcgtcgcccgcttgaccggcgattcccttgtcaccgatcgttttgaccgagcaaagacaggtgttcgcgggcaagtcgtccttagacgtctggattgcgtgaaggaaggtgcgatcacgcttgcccggctgcgtgtttgagcaaccatcggtaaggaaaacttttcattttacgctctcttgcctactcacgtcgtggaaggtccagcttgtgcctggattggcattagtagctctgccatcctcgcgtcgatcgaacttgtgggaaacattgcttgactacaagttctgagtaagccttgcgtcggtaatgtggtatgaattggacactcactttaggactaaagcagggaccgccaccttgtcgatgataatcggttgctccgattcaacgtccacccactgttcgtcttggtgctttttgggagacggagatgcgggcgagatcggggattcctccattgacatgattggttccgtcgaagctacagggctagactcctccgattgtacgcttgcctctcgtccaacagcatgtagctcatgaccgatgtcgggttcaacggatatcactgggtcggatttggattgtacatccgcggcggaggagctcgcgatgtccttagcagcgggagtaggaattactactgcggtgatctctctggaatcgggcatgtctgtcgcggtagcaaccaattctaacgacccaacagcgcattggcgccctgttttctctcgtggcagctgagcacacgaaaccgagactgaatcttgtccttcgagggtttgctcgtcaatcctctccagacctgtcataatgatttgtttcggggttgatttcactaccgtttgactatgcacttgttcgacggtaagagctcgcgaatcctcctcattcgcccctttgcgctcgccgactggagcggatcgcaatagcttttcgatcagccggtcacctttactcatcccattttctgcagctccgactgatgtgaggcttgtcttgctgatttctgacgtggtcgggacctgagacctcgaggtggaaggattcgaccgggcgtctgatcggtcgcctgttgatctcacagcccgatcgcctcgagacatgatcttggccagtgcactgttacggagcgtggatgtaggttcaacctcttcggtctgaccagcgctctgatgggtcgaggatcgagcgtgagtatgactggactgtcagattatcgactccttgtttgactgacctcgttccctttcgcaccgaagctgttatcccgtctcaaacgtgactcagctagccttgctttgagctctgcgacgtggtcttctctaccagagggcgaagcttcaggggagcgcgttctctgcctatcttgctgtttcttttgcccaagaccggattctaagtcggacgtcagtatggaaagcatcagtctctgccagtgctgacgcggtgacactgtcaactcaccgagctccgtttccggctctcggatatcctcccactctgcttgttcagggtttgaacctcctgtcgtactcttcacgagatcgttccccctgtacattgccgaagacaaagaaggagtcgagtgatcgcgagcatctcgcttcttgcgttcctctctatcccttcgcaatttggcgaccaggtcttccgtcctcctccttccgttctccagttttctctgactgtttcctcgtttactctctcgctccccgaactgattttcagcctctgcaactggcccgaccggtgcataaataggtcgagctgctaggagaaacgaatcatcgtctacctgggtcggcaacaggaccgagtcgtcgaagtccatcttcgaagaatggctcgccgagggtaatctaaacgctgatctctgaagatacggtccgagagctatattaacagcgaggaatgagcgacaatgatgtcgccgttgatgccggttcactctgtatggtctgtaacagctataacagtgtgcagaccgcgatatgacgacgaatcaattgtcaacaaaaggctcagcagcattcatagagagacccggactggtggtttgttgacattctactctctcacggacatgaccacatcgatgatgtccgtcaattgttgtcaacctgaaacttggttcacaatgccggcatcatcgagatgtcacatggggaacatgggtgaggactacaagtgaccgcgtgaggcaggcgaagtctcgcctacagcttgtgagtggtgagtcagatcacaactggacgttcgcgcggtcccgacgcttcaaatgcctcttgttggcgtggcaacctcccgcggaagcgccttcggtctgaacagcggcattctgaaggaccggcgtggtcttgtcaccgtgattgccccaacgaccaccaccccagccgttgcccctcgaccaagtaggtttgggtcgagcagcagcttcgctggtaggcgccggagcgacatcgctgagggaagaagaggcggccccggaagtcgccactcctaccgctgccgctatggtggtaggcaattctgacggctgaggtagaccgatcgcaatgtcggaattgccgggaacagcagctgtcggcactacgggagcagggttcgcgatggcagtgtcagatagtcctgcgggaggatcggctggaggagcctctacgataggctgcacggttccagtaggaacagcagcggtcgggaccacaggagcagcatcggtagaggcgggaactccaggcgcggaaggaggagcttgaccctcagaaacagccgctgaggacggagcaggtgccggatcggcgggggcaccggctacgggtactgagccgccagctgtgacatcaatatcatcaacggggaggtaacaagccacatcgattgcgtaagacttacggttgtcgatgatcttgccagtctccgcgtaggcgggatcggaaggcttttctgagggagctgaccagacggggttatctcccggcaactttgtcagaggtccggtctctccgatatcctagtgatcaagaaatcaaaatccgtctgcgcggggtataggtcgctctcgaacatacctcgtcaagcttccgggcggctatgcagttctttacaggttgcacgtgaggagccaggatgggacaatccttgggccctggtgaagccgaacgtaatctcaatgagctcgttcgccatcctgatgagcccacaataacgcgacttaccgccttgcatttgggggcattccatcaaggcgcggaccaaaagggaatcggttggattggccggatctccctcgctgaaaccgttgacaaaatcggccttcgagtcccgggagtaatcacagtcagcaatgttttaccattagcggaaagttgacggcacatacgtggatactgtaaccggtctggtctccgttggacaaggtcaatctgccctctgtagtccacgggattttgtttacataataccaggcctcgatacgcgtggtcggaattctcttcggatgactagcagggcaagggttgctcgcgtcgctgtggatgacatggcttttgtgatcgggtctatggccagatctgggttagcaaaggtaggttgggccttgaagtactgtcatactcacgaatcgaggttgactccatcccagcaatttgggaaatcgctctaagtggagttgacggcttgatcagcatacgctcgaggaaggcacttgaaaagacgtagtcgagactcacgccaagtctgatgacatcacagtgatactgcttcacctcttcaaagtcaaaagaggtaggaccaggaatcgagtcatcgcacaaggggtctccacctggctgacagaaacattcaaagccgttcgctcggtcttcaggactgtccccatgaggtgtgttgcgcttggggtcgcccgtgatcatcctgaatccagcaggcatatcgtagagttgttcgtccccgaatttgtctgctttccagtagaccgtcaggccgctgtgaggcgccacaagctgaaaagtcccgtccgctttctgatagtagagagtcggctgccaatacagggacatgtcgtcttgcacctccgccgtggctgagcaaatcctcagctcatgtgagttgtcgtcaacagcgagataatggatggatccgacatactgcaatcggatgcgcgaagctcctcataggttactttctccttgagggccgaagaaccggcgattcgatggaggtgagtcgcaggcgtgccctcagtccggatagggtccagcctcgtgtcgatgagaagcccatgtccgctgagcttgcggtaggtatcagccaaataacttcccaaatcactcaataaacgtacgtgatgaaatgttgagaggcaatgactacgggcgtagtcaaaaagatcgcgactgccatgaggccccgcgaagcagtggaagtgcgacccatcatggattgtcaaagagatgtaggcaagcgataaggagcgtgacttgggtaagcgggaagagtgtatgggtcgaagtagcgggatccagtcctcgctatcgttatttggctagagaagagctgaagatttgttatgaaagagcgctgtatggaacaagatggcctggtgagcgatttgagcccaggtaccatatatggctttgcagatgaatgaccaggcagtgatgcaacactcctttggcgagatagaggacctctttttttgacgaaacggttcccgtgttgctcgctctcccctcctcctttgtaaaatcacaggggtaggttcgaaaccgcggagtgatcacggggctcacacgcgtaaaacgcgtttcagaccgttcggcatcggctcggcaacacctaatgcggatttcggccggcaaggcgtctatccaaggagggggaatacgagtttgatcctctcgcgtatccgttcaaggtccgcttgcatgcatgcgtatgaatatatagaactgaatcaagggattcgagcagaatacatccgtcttatatgtagatcgatgcattggactttcgtaatctaaaggcggttgaagactcctgggagatcagaaagattgggttgggggagaaggacggggttcggcccaggggttctgttgaagccccttctgtctcggatgagatcatcacccactggccgtattcgtaccgacctcgtctatcaagcgtcgggaatcgcggaccctcttcgtgatggcggacacgttggtattggccagtaccatatccatcgagagctccacatcaaaggcctgttttatgatcgacgtgattcgcttgacttgatgttcatccatgattgcaaagtcgtcgatctcgtctccgatggctggcgattgaagcgggactcgatccggcatctcagaggactgcaataactccgagccgcgaccggccgaaatgtccgtcggcgtcagttcctcaaagggaattcctgaagccagttgacgcgccagcgaggtcgcagactgggggatcagcttgggatccagatcgacggacaaggcgactatcgtgacgacggcttgacgcgtcgcagcaaaggactcggaccgctcgcggcggggaactgatggcaatgggaagtcagcacgacgcgatgggcgagtttttctctgctcttttgaaaagcgcgacccaccaaagatttcgaggggagcaatcttggtcatgacattgtgcttgccatcgtgatggagcctgagttcgtacatcccaggctgccaaggaagcttctccttgtcaaacatgaccgtgccggcgtcagacgtccccgtgtcagagttctcaacaggggtgttgccatcccattcttcgtcgtagagcggtacccacttgccaactgaggagatcttggtaatctcctccgattgacacgaaccaagacgatagatgccgatccaatcctttctcgagtgaccagggggtgcgttccaggaaatgcggatgggctgaccgacgtggaagcggaccgggtcatccgcacgagcagccgaagtcggaacagtcatatggtaacgggatcggtcgagggtcccgatgtcactagccaatcgactacaatacgggtgcaatcgattagcataattgtctgattgccaacgtgaagcgaatacctacgtaatgatcatcttctcccgcgattgttgaatcaattgcttggtatcgtgcacaacctcgttgaggcgaggtcgggctatgatgaggcacaaagtaagccaacgtacataacgaatgattcctataatgtcacggaccagattgaaggaaatcttccatcgcaacgtgtaccctctcctcgaccctgaccatggtgtctttgacttcgctgactacccgcttgagttccggagcgtggcgaccggctttactctcgagcttgcgggcatgctttccagcgaccgtcttgatggtcttcgtcagaccgccatcttttcgaagacgttcaccgtaaagcttttgcatgtgaggtctaagacaagatcgacgatcgtcagtgcccggggagcggagcgctccctgtcaaatgcaaccgagcgcactcacttctcgacaaacgaaaggaaccaccaatgactcaagtgcgagacgactgccaagaaggcaacgagcttgctgccgctaatcaaactcaacccgaggaaggcagcgccacccatgcttctttccgggttgttcaggaatcggtaaattccggtataagcaagcttggagggaatcttttccaccaagaagaagtccgagtaaagccagcctggaatcatatcgaggtcagccgacgagacctggaatggtgacacgcagatttctgtcttaccgaaagctcccaaaacctcgaagctggaatgcgctgaccagatatgcaatgcgatgagaagctgcgggaatcgcaaatgctcagattctcctcctttgcttcaaacaacgggcaagactcacgcttccaagtacgtgacgaagcaattgacctccaacagtccaatcattggggatactgtagatcttccaggcaaggcacgtaaacgatactggaccgggcgagcaacacggtcagttgcatattcgacgcatgttttgcccagggcacacagcgaaactgaccgtaggtcatgaccagactcgtattgtagagtaccttccaattgtcgaaggcgtctctcgttgcagcggcgatgtcgttcgacgcctcgtcttcaacctcttccccagaagtacggtcagtgctcttcagcctagattgcgctgaggaagcggcacgctgtaccgcgggatagtgataatgcttgaggaaatgtctgaccagccatctttcttccgactgaaccttgaggaggaacccaagcccgaaagagtggaacaagcgccacgcaagagcgtgcaggaagtaaaaggccaaactcaaacgaggccgagtcatcacgaccgggctaaacattgccgggagcacagcgtatcccactagcaaagtgaatgtgaaatccgttgctctatataagaacgtggtcagtcaaagctggccgaagactgtaatgacgggataactcaccggaacaagtcgatgttggcaaagatgatagcagggcgttgcagatattgcaacgagagctcgcgcatggtcagccgaacgggttcggccgactgactctgagagcggacgagctgcggaatcgtttcctggacaggggtgtcgaggtcaggatttcgatcccattcattgtcagtctcgcctgcgatgatagcggatgagcgagaacagccagatcgagcttgggaggccgcggactgaccgtcagtcacgcttggagtccggtcctgcgagacaagaccgggcgcgggctctacgttctgagattccgcttcagtctttgaggtcggcatgccagccaacggctttttgccacctccgtagattcgctcgatgtctatggcgagtgctcgtgagccacagatcttggcatggccatatctgacactcacgagggttctcaaaccacaacaaaaaggcgaactgggcggcatgagcgataagactggcgaagaacaccgtatacgatcccgtgactatcgtgcatctgggttcaatgacgttacgtggcacgacttatcgatgggcgcagacggcttaccgatggagaggccgtagtaccctgcgtaaccgacagaatacatcggatgcggcgcgatctgtaaaatctcacctccggtttagctctcaccggccatatctagcctagccggaagttatgcgactcgcctcgtatacaccatcaaacaccaattcttcctgctggacgatcagccaaaaagcgtcgccccagtaccaagcgtaatctttgacgacgcgatgagcgtcgatcttgacccagaggttgaatgcgatcaaggtccacccaaagatccaacggaagagatgggtaaagattgactggttggcaggaaagtggaggtaggctagggcgaagaaacaataggaaagaaagtcgctatgcaccggtgcagaggatcctgatcagtaacggtggaatcgagggcccgcaatgttggggactcacttgaggaggatgacatcgacgagttgacggaagatcaaccacgagttgaactcctccggcacgtcgttccacctgtacccctcgttgcccaatttggcctcgagttcttttttccaccagcccgcccaaccctgatcgtccttggacaaccatccaaacgaggtcaactttcggacgatccatttcttttcgctctgtttcctcaagacccaaccaagtcctccgtcataggccgctcgccaaaaggcaaagtagagcaggaagaacggtccagagataaaacggggcaggtaccgaaagatgacgaattgcagacccagagtgaggagagtgagctgagtcaattgagaggtgaagatggtgtgcgatagggtgtgaacgaaggaatgcgtcgtagggaccttgaagactagggcgggacgtcgagtttagccgacgggacaggtcgaacgctgcggctggatcacatcgactcactggtacccttgggggtccttccatacatgatcccggcgctatcagtcgagatagaagtcttgtccccgttggtcggtttcgcgagttgggactgctgctgcttttgttccggattgatctcggtggtcgggcgtccaggagtttcattcccggacggccctctgtagcgaagctcactggcttccatgggcccgagaattgatgtggcaagtcagactgaccgtcgattcgaagcgatctgtgtcgaggggatttaatcgagatgtaacgactcgagcacgaggtaacagagtagcgattccctggctgactttttaggttcggtgatggtctactagctgctgcaactactctgacgctgacacgtattcgcttcgactcgaggacggaaatgaaatctcaaagcgaagcacgcgagaaatcgtccgagatccccgagaacccgtcctcggctggtcacactacgacaaaactattaccaccactcgttcgtcagtcgacaacgtccccattgcaacccggcttaaaggcagcacaaatgatattctatctcgctttacacatcccttcttttcatgcgcttgcccaactgctccccacacgtcactcgaccggctttttaggacgactcggcccacgagttgacgagcttttcgaggtcgaattttgggtcttcggggtccgtcacgactggtgacatcaaaagtgtccaaaataagagcgaacgaacgtcagcttttctccgtcttgagattgatggtagccgaagtagagtcgtatctgaagttctcagcagcatccaacccagcttgaatgcaggtcgatttgcggccgtgtttcgtttagactcttcgaatctaaagagcaagcctggggtgtacctctggagcaaacatcgtccaccctcttgaacaggggacccccgcttcacaatcatccccgcacgtccccatgtttcatccaagcgaaacagatcggccactcgaccccgtccatctcctctgcctctcctccttctcgaactccagaccgtcttccaccgtggactttcagcacgacatgatccgactatggacactcacgtgcggttcccttcttggagctcacaccagcagcctcctcggccttcttcttggcataagcagctcgggcctgctcgatcaggtgttgacggtgggcttgggcatctccggccttttgacgaaagaggggggggagggggaatgcatcgaagtcgggtcagctcggatcgtttgaaaattcagggaaaaggccgagctcgcagcgattagccagcaggtggttcgaagggacgcttgacgaggatcgtggtccgaatgcaggatcgaccagggtctaccgcagctccgtccgtccgacctcttgcggcctgctaagacgctctagattccagcattcccacctgggcgatgccattcgacgtcatctcgaggccgaggaaaatgtctgctcaccttcttctcatcgtatcgggcctggagggtggattggtggaagataccgtaagtgataccgaacaccagggcggtataacgagcgacctgtcaggtgtgattatgtattccgtgcgtagagagtcgatacgtgggcggggaagcgaagatgggacaagtgggaaagagagacgtgatggtaagtaagcggtgtttacgtccgcacaagaccgaaaaaaacgtaggtcgcgggatcgaggtcaccgtatcgacaagatggacactcacgttgacggtctgggaagccataatgaggttcgagactatgatccgtcggtgcgtagatgatccagtgtttcgggtatccagaggaattgtatgggacgagtaacgagaagagtcagtgagttgctcgatctgacgcgagagcgagagagcctgcatgttggacagcctgccgtgacgactgagcgaccgcgatactcacgcgaaaaaagactggattggagacgataggcagatttttaaagggctgtgttggattcagtttggtgtttgtacgagatctaaaccgttgtcgatatcaccacacttggaggtcgagcgaggtggaagagtaagggatcagggaagcgttgtctcccgattagattcctctcggtggagtttgtgtgacagtagtagtagtcgttatgtttctgtaccgcggatacacaaatcaacatagttgaatctacttccaacgcttgacatcggcgatcgacctcgagagcaacttggattcgtcactcgattgctagattccgacttagcaccccgtaacacttgctatacacaaaatctctctgccttctggtcacagttgcgaaagtgactcgctgcttgctgcagagacggatgaccagcctcacgaaaagcgaggctgagatcacctaccaccggctcttacacgaccatgggttctcaggcggactcgtcagcagagtttggctcgtccagtttcgacagggctcttgccgaattaccactctccgagctagaaggacctcttcccggacctgccgacaatgtcgtcaagtcagtccggttctccaatgatgacgaagctacgccttcaccagactggcccgacgaggatgaactggctgctttcgacgaattcgaggcggagcagagtaggaagagaaagcgagaggcaatggtcatagaggacgtcgacgaaccaggaaccaagggctcgtcttcgacaaacaaggacatcagtcaggtggatcccatgtacgaagatcatcctgcatacgtcgcaagcaagtttggggggataggcgcctatttgagacataaacgggaaaagctgcaagtgactcgttcttctgcccagcggctctcaccagctgatcttgtctgcgcagtcaaatacagaacgcagcgatcgctcagactcaagggcaaaataagcctcaaatattcaagggtttggagatctacgtatgtctcccgatcgacgcacgtaatcctgctcagtgactgatcaaagacgatccgccagatcaacgggtatacggtcccgcccctcgacaagctgcggaccatgatcatgcaacacggtggcacgtatattccctatctggtgagttcacaaccgacactttcgatatgatctcgcaagctgaccatccatatcgttcaatcaggatcgcaaaggcatgatgtaagtgatcccccgaatactttctttcgtgggacctacctaataagtccggtgggcacagtacccatatcctcgctaccaacctgacgcctgtcaagttcaaagaattcgccaactacaaggtagccactccgacctggatcgttgacagcgtcgacgctggcaaactacttgattggcggaaatacaaattgatgcagaacggaggatccgcggaaagacaggggttgtctcaattcttagcacctcgggagatcgcaccggtcaagaaggacaaggggaagggacgagaaatcgtcgatgtgtcggtggaaggggatagattctcggtacctcccgagccattcccgccccaggaaccctccatcattagccaccaggaacttctagatgataggcggcacaatctccagcccacaggaatccctctggtgcaacccaccgtagagaccctaccaccacttgccgctgctacagtcgcgaagtctgcaagggaaatctttgcgcctaccaaaggacaagcacctcccctatcgacagatccgatcacgttcgaaggtgcggcgtggatgggttatgccaagaatgccgagaataaggaggccaagcgtctcatgcagaatcaggaatggcgagagcagaacacggccgtctcggacaagtttctcgaagggtactataagaattcccgattgcatcacctttcgacttggaaatccgagctcaagacgttggtcgcggaagctcagaaacgagccgaggagacgagcgccgtaaagagactcgccccccgggcgagccaacggcaggcatatagtctggctcacgctatattgccgcggattccggaacgggtcgacgcgccaaagacgacggtcaacactagttcgtcgaacaagcgagtcatcatgcacgtcgatttcgatgcattcttcgtttcctgtggcttagctagtaggccagagctacgaggcaaacccgtcgtagtctgccatgcgcaggggaaccaaggcgcttcgagtacttcggaaattgcgtcttgctcttatgaagctcgtgcccacggtgtcaagaacgggatgtccttgggccaggccagggggctatgcgctgatatcaggactatcccgtaagtagaggggtcatagcttcagttcgtgagctcttctgaccgtaatcggccctccagttatgaattcgacttgtaccgcgaaaaatccctgtcattctatacgatcctcatgtcctacgcggatgaagtacaggctgtcagtatcgacgaagccttggtcgatgtcactcagcgggtcctggagctggaacaagccccgcctgattttaacgaatcgtcaaatgaagctcgagattatgcaaagcttctggcggaggatgtaagggcggacatgagggaggcgactgactgcgaaggtgcgaaataaatctcttcggctcgggacgtctattgagattaatgatcgacactcccgagtagtcagtataggtatcgcgagcaacatactcttatcgagactggccacacgacatgccaaacctgcaggatcttaccacctcaaagctgatgaggtcgatggcttcatggcgcctctagacgtcggagagttgcacaatttcggttatgcaacgaaaaagaagatcgaatccactttcggaacgactacgtgcggggaattgaccaagatcacgcgaggcgcgcttcaagcgtgcctaggtgaaaagaacggacagacattgttcaactttgtacgtggaatcgatcctcgtcctttgacgccacatcaagagcgacgctcggtatcggccgaagtcaacgtgagtcactcttaaatggtgtacttcactatcaagcctgatttaggcctctgcccgacacagtacggtatacgattcgtttccgatgaggaggtcgtaaagtttctgactgatctctcgcaagaggtggcccgtcgtctgcgcggtatcgatcgtttgggacgtcaagctacgctgaaagtcatggtaagaaatccggacgctccgcaagaagcgccaaaagtaagtcggagcgaacgaaacaagcataccggttctctgactctatcgactctagtttatgggccacggagtttgcgatgtacataacaaatcgctacccataagtggcccaacagggggcgcaactgacgacgggggtcggatcgcctcggctattctgaagatttacgaatcccaaagatttgacgcaaaagagttgaggggaatcggtattcaggtacagaagctagagtctcgctattctgcagaagagcagcgagctcctggtcagggtgttttggcattcgcaaccaagtctgtcgctcccatcaagatagccaaagaacccgtagacctcacgatggacagtagtccggtattaccgggacctgtcactcgttctagagccatatcaaagcccaaaccagaaccaccaccaccaaagccaacagtccggcgaactaaggccgtttttaaaccggttcagatcctgccgtcagatatcgatctcggagtgtgggcgattatggacacggctatgcgagacgaatatcgcggtggttggcgaatgtcaggggtgaagatacctagcgctttcgagcgctcgaggctggccccgggaccgacttcgcctgcaaatgctcgtcatggcaaaggtatcgcttcaagggagaccagcgtagtccccttggtaaagagcaaagcggagattaaccggctactagcatccctaggtctagtacaggaagatttagcaacaatcgggatggatgtagatatgtttgcagcactggaccccgatgttcaaagcgatcttgctcgtgatgtcagccggaaaaagaccttgttccgtaggggttcagagaccccaacgagatcaccacagcgagtggttccgcataaggacattgtcgtctctcccacgaagcggcccaccatccggatgggatcgtctgaaccacagcaagatctcggctctgtgttagatggtctctccacgtggatggacgttgccgctgaacgagagccgaacccccgcgaggtcaaggtccttcgaaagtacctcagacgatgtctggatcccgcaagctctagtatcggcggagtacaagatgcgagtcaggttctgctatggtgggagaagttatgcaagagacgatggccagcgaggaacgatgacattgctggcaagtggtttgatacgctcgcagatgcaaggagagaagtcgatgggattcttgaagacaggtattcggacaaggtccgtcgccgccgattgtaaccaatctgcgatgacaacttgtgatacattgtccaagacaaggtacagtaggattacaaccagggtcactatcgatacacatcgtgtccggatgctttcattcttcatagtcgagcatcttggtcatgtaaaccccctccagctcgtagccaagacgcctgtagtagtcccgagtgccgacaccggaaatgaccgcaatcttcccgctgccgtgctcttctcgagcgatacgttcagcctcctccatcaagagcgtcccgataccttgatgctggaacaccttggggtcacgactgtgaacctggaccgcggttccatatacatgctgaggcgaggcaaacatttacgattgttggttgcgattcctaatctcgaggaaacaagctcgacttaccaattcccgaacgatactgcatcctccatcgatgcccgtcaattccttgcggaacgtcccttcctccgaacattttctcagacgcagcaagccgaccaagatgtcctgttcggggtcctcgtacgacaggaaggtctcccacccgccattggcgctgtagtccctgcgcaagagctcgagcgattgtggtcgtacacgctgatgaatctcggacatctaagtggtgacccccgtcagtgaatgtgcacaccaagattttacactcgagagcctgtgcacttacgccgacttctcgatatcgcacatctcgacagtctgcaccaaagtccttcatccgatcgagagccaactgcctcaagtttccgttctccacaccggaagagaccagtggcatgggaatatcactaacgatgatatcacagtcagctagtgtcaacgacgtgactctcgatgatgacgccgacgcttaccgttgtacccggtagactcgggtccatgggggaactagtgcgaggatccgcgccacaatgtcgaccaacgcgttcggtgtgtaattcttgtatttgcctgtcctccagagttcatacaacccggttccacgaatgaccaaagtagggtaaagctttagcccgtcacttcgaaacgccgggttctcgaagaattcctggaattgccagatatcccgttcgatcccacagttggggagatccggcatcatatgggcgacaatcttgtacccggcgtctttggagagatggaaagattcggatacggctcgaacggtatgacctcgattcgtgtccctggcaacgtcttcgtataccgattgcactccgacttcgagacgagtgcatccataccgtaacatttgactgtaggagggggacaacgtaacgaggtcagcttggacgtccaggaatcactgatcaggcgggactcgcctcaagtgcggcttcaggcaataatccggacgtgtctcgatggtgatcccaacacacttggtcttgctctgttccgagtatcgaacggcctcgtcgatatcgagccccgtgtacccggacaaggcgttgtgcaggcccgcaacaaacttttgacgatagtcttccggcatggacatgaacgttccgcccatgatgctggacaacgatggcggtgaggcaagcgatactgaggtcgacagatattagaggcagcttacatgtactcgaccttgtcgacactgtgtcctagtcctttcagctgatcgatcctgcccctagcctgttcatagggatcgtaacgagctcgaatcgctcgcatcgaagtgggctgaaatgtagcgcttcgatcagaggccatccaatgaaaagagcgaaggtttaatcacttacttcgtatcccgtgtaactttgtgtactgtactcaaagtcagagtccgggcctcctgggcagtagctagattccaggttggccgtactttcagctcgagctgggcggcggcatatgccagatagtaagctcacacgcagatatttccggtcatggccacgtggggacatcgatggggtttgcacatcacagcaacagctgcgatctggaaaaacaggacaaggttgtcagcccagagtgtcggtcattcgcctcatccgacgccgattgactgactccactagcggtcctgacaggcttggctcgaagggctcccttgagccgatcttgccactccaccgggacagcactgagaatatcgactagtctgggaactcccttgactttgtactttttcccatacttgagtcgaagttgattgaggttgatctcttcctccgcctgtacgcctgtgatcaggtcccggacgatggaggtgcaagccaaaaggtaggcctctgcctgggatggtgctgctacgaccattttgtctccaagtctagtatgtacaggttaagctactgcagcgttcctagaatagctggtggtacagcttttgatggacaagttggatgaacatgtgtaccatctcgttgaacctttcgacgctcggcggtacgttgaccatatttctcgatttacgcgtcgcccttcgccctcgcctgatccctccactttagctcgagcgactcgggcccggtcatatcctagctggatggctaggtagatgtaggtcgtcacgctgctcaggttgggctacaaagtggtactccgcaacacagccgacccagactacaaccgtgggcagtataatcataccaggaggtccgaaccgcatctccgacccgtgctgttgacagaccggcgccatgaattcgtaccccaccgaggtgagctcgctataacatgaaatcatcgccgaattttgtagctgatccgaaacacctcctggaataccgttcgaacggtcgtagtttttagctcaccatgctccgctcatgtttgtggctggtctcgggacgatcggttctgccaaggacactgcgtccgccagaacggaacatgacgagcagagcaggagcaggagcgggaccatcaaccagaaccatctcacgacgtccgagtcgaccagcttagccgcgtcaatggaagcgcccaagtccggtggatcagaactcggaacacagacacctacaagtcgatccagggcaggaagcattgcagaagcgaaccttcaagcgtctgctgggcgggacagggcggattccaccgcaggtcgcgcagaagcgcccatggacatatcctcgaccgatcctcaaccacacgtatcgatggacgagtttgagatgctcaaggatcatctacgcaaggcattccacagagattcgggcaagggcaaggtctggccggacgatatcaagccgaacgccgagggcaaggtgatcagaccgtctggcgcggccatgtccgacggtggtaaacaggtgcttcgaagaatggcatggcggaccgtcctcgttgacaaggtgagacgagtgtcaggtagattggagtgaactattgtcatcagggaggctcatttcgctggtcgtctctcaatcgattcggtaggccatccgactaccgcctaagaaggtcgcgcctaccgctgcgtcctcatctcacgtggactctccgatgatcgcctccacgactcctcattctcccctctcgccattgacccccggttctgccgcatacccagacggccttatcacgccgacttgggttcggaaacattccgagatcctgcccagcgtctttgtccatttcgctaggctgtacgaacactcttttcctcggggacaaggggcccaaacgtcagctccacaagtctcgaacgggagatccagagcaaattctgtactggacgtaatggatcccgtcaacgtacctattcccgcaaccccggctccctcgtccccttcaatgacacctaccccttcaatgacacctacgaagcacgcctcggattcgacaaatctgaacggatcgaccaaggagctcgagaggcagcgaagagaagccgaaaaacgagcggacgaggaattggtcagggagatcgcggaccgacgcaaaaagttggtcgacaaggtgactgggatcaagatgacggtcgtcctcatggccagccgggatgcccttggtacggtcgtttcgtgtttttgcctcgactggctgtcgctcatacgtcacttcgcctcaaatagatgacactggtctcgatgcgcgcttgagcttcatacgtcgacagagcggacttgataccaaggctagtcttttcgtcttgactcccgtcagcgatgaggaattggaagaattcgtctccaggtgcgacgcgtcgtggggagcagcaccgacaagtgaactgacacgcgttcggatatctactaaacagcctacgggaggcattgtacgaaccatcgcaagagttctatgccaatcactacaagcggaatcggcggaaacggggtcgcctaccctcaaatccaaatcagttgccatatccggtctcggtacctgcggggaccaaggttcttttgtcgtcagggtgggcagcacggtatgattacaaggcgggattgttcgcggagatgcggggtgactttgacatcgcacggaggtgagcccctgatcgatccggtgtccctgacatcggtctgaattcgacgcatcatattcgacagaggctatgaagatgcatggtatggtttagttaacctgttctcgtcggctggtgcccttccgccacgtagtaaacgatgggcggaggcgaaggtacttgcggattgcactgcacacaaggtccgccgctatccgatacatgcagcagacacaggaggtcgctgatcctgctcctactattagatctgcagactgtatttgtactatcaggacacttcagctgctgtgacattcttccagcagcacctcagtcgcttcacggcgttgtcgagaaactggggaatcggcaatgacacgttcgagttttgggcgtggatgggcaggcagtgagttcaagtgggcttgttcaaaccctcccacctaaaaaaacatctcctgcaggtaccgcatgtttgccgaattgctcgaactggccatccaggcgggcctgaagctggatagctcgttacctgcctatcttccaatgagcccgactttgcaatccccaggcggtacaccagtgttggaaagcgtcctcgtctcatcaaacgccccgactgccgtccttcaacatccagggtactactaccactctgcagccgattgttccgttcagcgagccgccaggtttctcgagttgaggggagaaacccctatgacaagcgaatctgggaacgcttcaaaatcgcagaaagtagccgcaacggctcccggtttagctaacgaacagaaaatcgaccacacagcgttgatcatcgaggtgagtcgctctcgtccgcaagatggttggcgccgagctgaacagttggagatctgttcgtagctgtttacaaaggcgtacagtcatttcaagcaatacgaaggtggtcaggctcgaatgagtatttacatcgcgtaccgcatagccgagacttacgccaaggcgggacgggacgaactgaccatgaagtgagagtgagacaaaatgtatccagagactagataatacgctgacaattttgagttagatactgccagcgaatcatgaagtcatacataaacgaaaaatgggatccggccgtctggtcgatacaggatctgtggtacgaggccgcacgtcggaccggctctgtagacacggccgtccggcttctgttcaacatgatggcaccaggtaagatgacatcatgatggagttcccactttacatatctctgaaactttcggcatcaacaggcggagcgcccccgccagaagagatttcccagtatggggacgaccttcaagcccttctggatgtaagttcctctcttcattctcgcagcaggacgacaccagcaggatattgttctgatcgggatgaatgctttctctcagacgaccgcttccgaagatgaacggttggacatagagctcgatagccaggtgcggccgttgtgtaagtgctctcacccttcaatactgttactgtgactgaaactccgaacagtcaatatatctgcgtcgtttctacgcgagcaaggtgatctcgacgaggaagtgggcttcgtgatccaggtttcgatgccaatggatgcacagttagcaagcttggctcttacaagcgtgaccatttccttttctgccgacgttccgccacgaactgtgcagcacgatcctggcatgccttggaaagacgtgatatgcttagtcgaaccacattcagacatctccaaggcgaatcttgaattcgtaccaagccgagtcctgaagctggctggcaaagttaccgcttcatctcctatgactgtgcaggtgagtttccgagactgtttatgcgcacggtctgtaaaacagctcacgcaaatgattcttgcgtcaagcaggtagaggatgtctcccttcaaatagcagcttcgtcatgggacgtcaggcttcgtgcgggtcatgatttgccactagtcccaaacctcaaaccgtcctcaagcttcgcgacactttcgtgagcctgagcagtgtacgcagaatgtaatcgcactcttgctgacgctcaagtgaattaacagcattctcgaattaccccttgacgtggaaacgcgaatagcggtcccggaaatcgtgtaccggtcagatcatgcagtggtcatatgcacagtgacaaacagggacaagcggtctgcgcgtttgaccttttcagcggatatcagggatattggcactgatcctggtaagcaggacagatccaattgaaagacagccaggtctcagagctgatcggacatctcacggctggctacagaccacccatcagtatcaggcaggccaacaataagtattggcggagaagaaagggcagtcgccttccgcgatcaccctctagaggtgctcgagtcagggcgatgcacagaagttcgcttgaagatcacctcccatacagctgcgacacagctgctggcggtagctctacagcaggtcaaggaagaactaaccgggaatcccgaatacataggcattgctagcacaaatatcgccttcgtagaaccgttgcaactggattatgagacctggatagagcctcgacatattgccggcgatgatcccttggtgaacagcagcactgctgttagtcagatctcagcctcattggccctgagcatggtgggcgatgccagtctggccgtacaagggatcacttttcgccattccgggctggtaagtcggggccaacgcctgcattttcacgcgtcgctaacatcgacggacttcctcccgcctcaggacgaggcggaagtccagccggatttccagtcgatcgatactgcgcctgaagacggtttcccgcaaggtgagactattaaagtgatcgactcagcacgtctcgctcatccatatggatacacagtatgggttaggggtgattcatatggcatcttcaacacttacagcgcttcgagtacgaatcggtcgagtcttgatttattccggggccaactggaagtctcctggaaaaggttggtcaatgcatccatgcttcttttccatctgcagaagcactgattaactggtcatgatcgcgatagggatgagccagagacccctctctgccagactatccttcctttccagtttcgcttcgacatcttggattcgctagtttgcacgataacgccgccgacgcagacggttctaggcgcttcattccgctttgaactcgccatcttgaaccggcacgagtttctcgaaacggaaaacctcaccatccaacttcatcagtctgccgctttcgcctggagcgatttccgccagttgccgctaccggccatcaaaccgaagcagagatggacatatacctacgaaatgaccccgatctcaggaactggctggcaaactttgccacggatcgtcatcaccggccgggaacgtggtctaccgaaagaattgatcatcagtgacggtcgcgatgcagcgcgactccagccgggtagtaccggcatgccgatctttgtcaggccataagcctgagctccggctacaaagagaacggttcctgagcacctccaacttacgacattcatgaccgagatgagagtagccacaaacattgaatgggattcaggttgtacgagtatatatccacacacggcatggcacaggaatttcgacgattggataagtgaacgtggcgaatcctaatagattctccgggggcagtcaagtgcttgaggcagaatctgcagatcaggcccaccttgcgacctgcccaccttctaacctgaccaccctgcgacctgcctgaagcgaggttcgttggttctaagtcgccgattctcatccgaggactcttagcgatagtaggcaagcgctgtcaggtcatagcgttgttggaacgggtgcgactcgactttgctgagccgctcagcggccgaatctttggcttcaatggggttgaccatcaattcgatatacatgccattgatacaaatcgtccaaaaaagtcccgcgtaaggcaatctaagagcgaacaatccgactacaattcctcctcttcctgaacagcggctccagcctgcagatccatctcctcgaaatggtccaacagctcgtccagcttgacttctgggaagtcctcctcctcctcgacctcgtcttcgtcgtccatatcggcctcgcggaacctcttgtcctccttgggctcctgatcttccgcctcgtcctcgacgtccatgccatcggcagcctttttggcgtctgctcggtacatgttgatcgcctgacgaagttcgggatcctcctccaagtctcgcaagaagagctcgtaatccttttcgacacgttgcgagtcgagacctcctcgacgaccgagagcgcctcgaccgacacctccgttgacgtccgcttggtcgtcggcttccttggcgatcgatttgagcttccagttcctggcctttgactttttcctcctgttggggtaagtctttttcacgagaatgacatctggcacccggttgttgtcgagagcgtcgaacgcgttgctgttaaagttggtatgggtgaggtggtacccgaggacggtgtcgccgggttgcaagatggctccgagatgcgtcctggtgtgatagataccgtcgtccccgcccataccgtcctcatccccggcggtggctcccataccggcaccgctgaccctagcgacctgagcgtcggcaaggacccatttaccacgaacgggacctgaaggctcgacgtcgaggacgacgaactctaccagatccgagatcgtcgcgagcgaatcgaacggcgctcgccagtaagtggccgaagtgacgtcggtgtgctggagggtcatggggtccaagagatgcatcgagtttccgatcctcgtacatatggtgagaggactgatatcaccccagctcctagcgagtttcttgtcgatacagacaaggtcgtccttgcagaccgggacgatctcgaccgagtaggtgaatttgtagtttgaggtacccgagtggatatcggaagacaacagctgctcagacgctttcgatctgagaacgtgaatgacgaaattataagcgtttcgaggaagaaaccgtcggcaaacccaaggttactcaccgaacgggaacaacggaagccaagaactcgaccatcttgatggccatatttcgctcagagtaaaagaaatcaagaccgtctcgcttttcgttgatggagatggtatccctgattacaagttacagaagcataagctcacgagatcctgtagaacatggcaggcccgttcatgcctgactcacttgtgcgcgttgtgcttgaggatcagctgttccaagaacaagaacgtcctcttgtggttgaccttttgcctgacctggacgcttgccttccacgtgttcttggcggcgagccttgcacactgaggacactgagcaccctgcacgaccagcgtgaggacaaaggtctgctggaggaccgtaccggagaggatctctttttgaatgatgatcttgagtttgagtcgacgggagtggggttcggtccaaaggaatgaggcgttgatcagtctgacccgggagaggggcttggcgatctttttcaaacagatggctagatatttgaaagcaagccgcgtgagttgagacctcaacgtcgagaattagagctgacgatgccgccacgacgtacagagcaactctctggactcgggctgagccgtcatccaagctccagggggtgaaaaccacctctcacatcctcgacaaaaggtgatcgaagtctccttggggataccatcggaaatatcgaccgagtttcgtaaacaaccgatgcacaagttggcaccgttgggttcaatgactgatccacactcggcacacaggatggcctgttgcgaagcgtaagcgtcggggacgtaatccatggccgacatctcgactgtatctggctcgtcgattggtgcttgtgtgtgaaaggtgtggttgaagggatggcgacaagagtcgttgagagacttttcgaggtcttcaatagcagtgtatcgcaagacgaaccttgccgtcttttgatctcttgatcagcagaaattgccttcgctcaaagttcttgttgaataataatttcggaggcaaaaacgaggcgaaagagtcgtaaaacagcaaagggcgagggagggagggagaaggtgattgattgatgggttgattgcgtaacgatgaataatattgagattacctaatcaatcaacgccatcgacacgtcggaaccgaatgatcacccggacgatccacgtgaaagtcaacccagaatcaccaagtcgtcatgcatggtccagcgaacactgtcgatcaagcatgtacaacaccaccctttgtcacatcatcatttaagatttcctcacagggtacatattcaaaacaactcaaggactcgtagattgcagatcttttgtcactggaccgagagtctcgctgctccagaattcgcagtgagcctctcagcagctaattcatcccggtcatcccctgatctcgtcgcattcgttgacttggtcgcaaatacagcaagccgatcagctccaaaacaggcccaagtccaccggagcatgcctcccaagacccagcctactcctatgggaccaacaaagcctcaaaagggcgccgtaccggcgacccaatcccgctcaaagatcagcacctcgtccacctcaccgcaagctcagctggatgccctctcccgctcgctcacttccctccggatcgcttacacccagacgactccgatccggataaaactcatcgacagcttcctcgcctttttcgtcgtcgtcggcatcctcttgatggcgtaccgggtcggggtgacgagttaccctttcaacgggttcttggccagtttcggaggggtcgtcggacaatttgtactgttggcgggtttgaggtcgcaagtggcaccaggacgggaagaggaatatggggacgtcatctctcctgaaaggtaagccggctgttcccgcacccccacccctaattctacctcgattatggctgcagctcacgatccgctcacgcgctttccccgtttgaatcacgaccgctagagcctttgccgatttctgctttgcctccatcgtcctccacgtcttcatgttcaacttcctcggttgatccgctatgcggcaatcaagagcaaacgcgccgactagcgtatacgtcccggaccttgtaataccagcttgtatgggaaagccatgcaggcgtaacgaaactatagatacctgattgaacgatcatacgattgcccggacgggcgaacctggaatgtcatggacgcttccagcgtactgcggcgtgggaacgaggcgccatcgaatccatagactcgtctgaacggtcaaggccatgggtcgaactggcgggaaaccatcgatcaacagaggtcaagacgaagcgaagctgctttgacgtctacttcctgttgccttgcgatggggaccagagttgttcgcgacgataagtgttttggccctgacggtttcacacgttgttcggcgcaatgtcagtcttggaattcgatagcccaatgttcgtacgatgactggccgcgagccttggcagaccctaccgttcccgtagagcgtctttcccggcgccggcgaaatcaccgtagtgtcaggtcggctatgcgtttaagtgtatttccgcgggcatctttcttctcctgtaaacgtatgcgcttcgccctatcacgtcgcagcatactggtcgtgtcgaaatcgactaagttacaacgatttgtatcgcttccagtccggcgggacaggttcacaggagaagtttcaatcaaagcaagtaggtggtcgtgagcatcaatatgtggtaatgggtaggtcatttgacgcgggaaatgtatgctgcgtaaggccatgaagtctacactttccgatccagtgtctccactcatcgcgacgcatgacaagtgacagacccatgcgcctgggcggctacgtcctgggcgcgagcgttgtgcacattctcttgctcattaccaaggcgcaaaggaaggctctcgcgagggtatgagacgctaagtctggcctcgtgatgatcccgacggatcccgctcgagcgtccaggaactctggtctggaaagttcaaagtcaaaaccaggtcatacgagtcccgcatgattcgctgagcgcgaggtttcagcgagatcgaaccccccgtttcggatcgatattataacatatcgtgggtactcacctggaggttctttgtagtaggggtctttgctctttgcggtaaccttcgccgcaattcatctgcttcgagtaagaggctcgtcaaattccgatccttcctttccgctagccaattgttcagcgcggtctcgatcgctggacgcccgcctatacccatcaagctgctcaattcggtcgtcatctcgtccacccagggattgacgaggatacgtgaccttcgacaccatgtatcgtcaacaaaaggtcagcatggatcgtgattaaacggctgtagatacatctaactgtgatgaggattggatgctagtcgaatcggagtcgctcatgatctcttttcgcagcgtcaatgatgcccattccgcgcatcgactttttgacccaaactcgacgaattggcggaggacatttaatcttacagtcaatcgacgctcattgagaagcgagaagcgcgaccaggttcagctcatgctaatgccgtcattgcgagacaaatccgttgtttaagacctagcgaaaccccgattctagtgtgcacgtaagccagcttccggaaatgaaaggtggcgagattgcggcataccgctcttagagcaaacccaagatcgcgagatgcttctcacttctcgtcctggtctgacggcttgcggtctgtgtcgtctcgctgaaacgagagtttttgaccatccccgcggatgatttggccgatcgcaatctctgttggctgcggggctgctgggctgctgagggtacaacgggagggaaagcctcgatatcatttctcttatctcccctcggtcgagccgagccgcgtcacgcgcgttgtacgtaaagtcgtagactggggctggttggcagggtgaggggcaggaggagcagggggcctcgagcgagttagcagccgcgctcgctcaatgacttgacacttcgctagtgatcctagtgagctagtgagcagctagacttgactggacttcctgcccttcccgttttttcccccccaaaaggaagcgctcacttatctcgtaccgattcacaaattgctcactctgtcgacctctctcgcacctcgcttcctacacaacctcatcatagagcacctgccagccacttgtcaagctatacgctctgtccgcgagctatagcccatcttctggaccaatcgagacgctgcacgtaaaaaaagcaccgtcaccaccccgtcggacccgaaatttcagagctcgtagaagcagcttgaacataccgtcgtcaacaacttgatcgacgacaactgctgaacggttgacagcatcgttcgcaccgagacctcagagggataagaaaagatgtaccgatcgtctttgcgtcagtacagggcggccgcgaggctgtccaccatcgccggacaagcgggagctcgagtcaggcccgtgcccacctttacgtcgatgaatggccgtgcgttgtcgacgtcgtccgtcttgcgagctgtcgctgctcctgccgttggtaactacactcccagcaccgatgggccgacgctcaacagccccagtgagctcgccaggaagatctcggcacaagtgctgcctcgactaccccccgtcgacgtgaaaaaggtcttggtcgtcggttcgggtggtttgagcatcggtcaggccggagaattcgattattccggtgagatcgggttttggtgggagagagcattgtcgaatcgagtctgttctgatcgaacctttactgtccattcatctcaggatcccaagccatcaaggctctgaaggagtcgaacattgatacaatcctgatcaaccccaatattgcgaccattcagacttcgcatcatcttgccgttagtgaaccttttccgggcggcatgcgcaggagaagcactcggctgaaccttttctgcttgctggcgctacaggacactatcttcttcttgcccgtcaccgccgactatgtggcttacgttctcgaaaaggaacgaccggatggtatcctactcactttcggtgggcaatccgcgttgaacgtcggtatccagctcgacaagatgggtatcctcgaaaggttgggcgtgcaggtcttgggaacgcccatcaggacgctggaagtctcggaagaccgagacttgttcgtgcaggctttgaacggtgagctgcagcacgtcccgctgtcattcgcctatgttcatgatcgctcacgcagtcgaatcctttaccgcctctcaacagagattgacatccccgctgcccactcggttgccgtctcttcgatccagggggctctcgatgctgccgctcagattggctaccccatcattgtccgatcagcgttctcgcttggaggtctcggatccggtttcgcgcacgacgaggaggaattgaggaacttgagtgccaaatctctcagtctgagtcctcagatcctggtcgagaagagtctcaagggatggaaagaggtcgaatatgaagtcgttcgtgatgctgccgatgtgagtcacatgctcggcaaccacatcctcgtcgacctgctggcttattgatctgctgggccctgtcagaacaccattatttgctgcaacatggagaatttcgaccctcttggaacacataccggtgactccatcgtcgttgctccttcgcaaaccttgacggatgaggaataccacatgttgaggagtgcggcgatcaagatcgtcaggcacgtcggtgtcgtaggagagtgcaacgtgagtcgcctcggccttctcaccttgatacgcgagtctgatctacagttggatctcgatgtctaggttcaatacgctttgaaccccaagagcaacgagtacatggtcatcgagatgaacgctcgtctctcgcgatccaggtacgttattttgtccaggcagtagccgaggcgcgaagtcgctcaacccatgcccttgcctcgaaagtgcccttgcatcaaaggctacaggttacccgctcgcttatactgccgcaaagattgctcttgggcacactttgcctgaactaccgaacgccgttacgaaatccaccaccgcctgtttcgaaccttcgctcgattacattgtcaccaagatccccaagtgggatctggccaagttccaatacgtcgagcgatttgtcggttcggccatgaagtcggtcggagaggtcatggcaattggccgaacctttgaagagtcgctgcaaaaggccattcgtcaggtcgaccctcgattcgccggattcgaggcctactggaagcccgaagagctcgacttttacctcgccaacaacaacgataggcgattattcgctatcgcccacgccatgctgaacctggactactcggtagaccgtctgcacgacttgacccagatcgacaagtggttcttgtacaagctcgagaacattgtcgaagttcacaagcgaatcaagtcgaccgagttcgatgccatcgactacagtctgatgatgtcggccaagaagactggtttctctgatacccaaattgccgatttgactggaaagaaggaggatgatgttcgagctctgaggaagtctctcggcatcaccccgttcgtcaagcgtatcgataccttggcggcggaataccccgccttcaccaactacctttacaccacttacaatgcctcaacgcatgatgtcgaatttgacgagcatggcactatggtcctgggaagtggagtataccgtatcggaagcagtgtcgaattcgattggtgtgctgtcacctgttcgcgagctgtcaggaacctcggcaagaagacgatcatgatcaactacaaccctgagaccgtttctaccgatttcgacgaggcggaccgattgtactttgaggaactgggcttcgagagggtcatggacatctacgagctggagggagcggagggtgccgtcgtcagcgtcggaggtgagtgaacgagtcggacagagagctgggagctcgagttgattatggtcgcaacttccaggtcaactcccccagaacatcgccctgaggctcaagaacagcggtgtcaacgtacttggtacggatcccgagcagatcgataacgccgaggacaggcacaagttctcctccatcttggacagcatcggtgtcgatcagcctgattggactgaagctgcttccctcgaggatgccaaggcatttgccaaccgtgtcgggtaagttgcaaccccaacctgcttttaactaagatcccgggctagcaaggctgacgacatgttattcgcatagctaccccgttctcatccgaccttcgtacgtgctttcgggtgccgctatgaacgtcgtgtgggacgaatcgaccatggatcacttcctctccgctgcggccgatgtttctcccgatcaccctgtcgtaatcaccaaatttatcgacaatgcgcaggaaatcgacgttgatgctgtcgcacacaagggccgactcatcgttcatgctgtttcagaacacgtggagaacgccggtgttcattcgggagacgctactctggtcctccctcccttctcattgtcggacgaggacctcgatcgcctgaaggtcattgccgaaaaggttggaaaggcatgggagatctctgggccgtacaacatgcaggttagtctggttcgggatctttgggtcatactgaaaacttcgctgaccgctcatggcacacgcagatcatccgaaagcctcctgtcgatggcaagcctgctgagctaaaggtcatcgagtgcaacttgcgagcttcgcgatcattcccgtgagtgctgtttcagcgatgactcaagatggcgattctcaatccagtctttttacaaatccccaggtttgtctccaaggttctcggtcataacttcatcggtaagcacactcacggcggctcttgatagcaagcaatctgacggtcccttgtcgactgccatagacaccgctactgccgctatcatggaccagaacgttcccgaacccgtggacctcatgaaggtcaaacgggattacgtcgccatcaaggtgccccaattcagttggactcgattgggtggcaacaagggaggtgctgaccccatgctcggtgtcggtaagtacagcacacatgtcagcgtcgacctcatcgctgacccttcgtgcacatgtagaaatggcttctaccggtgaggttgctgcctttggccgtaacgttcaggaggcctacttcaacgccactatgtctgttaacggattcaagctgccgaaggctggatcgggagtcctggtcggaggcgacatcgacaggccagagctgggcttggttgccaagggcttgtcggaccttgggttcaagatcttctgttctagcacagccgtggaggagcatttgaactcgattccttacctggttcgtctatggcccacagtcctgaacgttcctgttactgaccgaacgaaccctctatctagtctgcttccaagatcttcttccctgtcaaggacaagggcaagctgttcgaggctttcgaaaacgcaaagtaggtcgggagttgacatccttgcggcgaccagacaatcctgacggcccgttatcacagcatccaaatggttatcaacttgtgtcgatctcgtgcacccaacaccttggatgagaactacgtcgcgcgacggtcagtttataagatggttcgcgtcataagcctatatcttattcctcttgcaatcttacatcgcccttgacagaaatgctgtcgactttggtatcgctctgatgaccaaccccaaccttgctttgctttgggtggagactttggccgcaaaaatggcctcgggcggtatgcagggataccaggagggacagatcccggatgacgtcaagtcatggcgagaatgggtgcctcacgcatagacgaagtacgtttccgtttataatcggagcctatcatagaattgacctaacgacaacgcgtcttaaccagggttgcaatggctcgcgacgtgttttggctgtcttttgctgataaggcttttcggaaggtcgtctaggctaggacggcggctcttgcttacaggacagagtcgttacccaaatgcgttcgttggagttctttagattgttgtatacaactatcatcatttctaatcacgacacatatgacctgaccgttttgaaacgattactttggtgtcacgtgatgtcggttcaccgatcgctcagtcaggtcgcgtgaacgtcgccccctcacaatagttacttacggctcgtgccggtgaattatatacggttcgaatccgaaatgttactgtacactactgtagatctgtccggcttagatgctaacgttcatccacaaccaagctagatcaggcttcgtcgagcggaccgtctcggtataggcgaaaagcgttaagtagagatcggaatcatggctcctgctacccgtgctcctgccgggaccgcccgcgcaaagaaggcgaaacccgccccggcgcccagagccgttgatatggctctgaagcagaagatggttgacatggctccagatctaggcgggcaaggtatgttgggacctgaagagaatgcttgggcgcaattgctgcgacagcaacatgggaagggaagccgagttctgggcttgaccgatagcgtcaaaacgattgaggtaagtgcgaggtgatatttgtgagcgtaaatggtgcggtattctcatcatgcctcaaacaggacaagtggctgctactaccagaatacctaaggaccaagggtcttgtgtaagtcgagaagtcgaatgaacctccagcttatttgccaggtgctaaacttagcgtttcgacgattagcaagcaacatttggacagcttcaactacttcacggacacggggatgaaacagattatgcaggccaacaatctcgtgactaggtcagtgcagtatgtatagaagttattacgttccgcgtcttatagctcccatatacagtgatgtcgatccgcggtggtatctacggtacctcgatgtgcgggttggtatgcccacccgtatcgatgcgccaaatcacaatcagcgggatcatatccttaccccgcacgaatgtcggctgagagacatcacatatgccgcccccatctttgtcgacattgaattcctcaagggaagaaagcgaacaacaagaaggaacgttcagatcggacggctgccaatcatgctgaggtccgatcgttgtgtcctcaagggcaagacacctgagcagttctcctctttgggagaatgcccgtacgacgtatctggaatcttcatcgtccgtggtacggagaaggtcattttagtccaggagcaattgagcaacaaccgtatcattgtcgagaccgattcgagaaagggtggcgtgcaggcagtcgtgacttcgtaagtcataggtcaaaacctcccctggtcggtcagtcccatactgattatcgactccgcagatcaacgaacgatcggaagtcaaagagttatgttgccaccaagaacagcaagatctacctcagacagaattgtttcactgaagatatccccatcgtcatcgccttgaaggccatgggatgtggcagtgacaaggaaattatgttgttgtgctgcggaagcgatgaaccttaccaggagaagttcatgatgtcgcttgaggaagctctcaagttcgtgtgatccgctccataagccctgtttcgcggtttactcacattccactttgtggcatcatagactaggtgtgcattccaccaagcaggctctggcctggatagggatgcgcatcaagcctaccgccgtgaggcagactggaaacaagcccacacccgtcgagaatgctctggagtgtctggcttccattcctctgtgtcatattcctgttgaacacggtgacttccgaccaaaagcgatctacgcggcaactatgacgcgacgtgtcctcatggctatggtcgaccctgagcaggtggatgatcgagactatgtaggaaacaagaggttggagctgtgagtacggaaacatctaaatcgaaggcgtccacctctaacagctggagctttcggatagtgccggccaactgctctcgctgttgtttgaagacagcttcaagactttcaatgctgatctcaagaaacgtgtcgacaaagtcttgagcaagcctaatcgggcggaagatttcgatgcaatggacacgttcctcatgcatggggacatcattactgcttcattcacgcgagcgctatccaccgggaactggaacatccagagattcagaatggagcgtgctgggattactcacgtccttagccgcttgagtttcgtagcggctctcggaatgatgacccgtatcagctctcagtttgaaaagacgagaaaggtctctgggcctcgagctttgcagccgagtcagtggggcatgttgtgcacaagcgatactccagaaggagaagcatgcggtttggtcaagaatttggctctcatgacccacattaccaccagtgtcgaggaggaaccgatcatcaagctcgcgttcttgcttggggccgaaggttcgtgggcgccattcacctggaatagaacacaaggcgaactaaactgcgttgtcactcagatgtatccctcgtttctggtaacgagctgtatcgccctggtgtttacatcgtcaacgtcaatggaggactggtcggggtgacacatgcgcctattcgcttcgtaagaagtttcaggaagctgcgacgcagcggcaggacctcggagttcgtatcgatctacatcaaccacagtcagcggacaatctacatctcttgtgacgggggacgaatctgtcgccctatgatcatcgtcgaaaactgcaaagctcgagtgacaacggaacacatcaagcttctcaaacagggaaaagctacgttcgaagactttctgaaagctggtctgatcgaatacctggattgcaacgaggaaaatgattccttgattgctttgtacgagcgagatatcgaagagaaaacgacacatctggagatcgaacccttcacaatccttggggccgtcgctggtctgatcccgtatccgcaccacaatcagtctcccagaaatacttatcaatgcgccatgggtaaacaagccatcggggctattgcctacaaccaattggaacgcatcgatacacttctttacctcatggtttatcctcagcaacccatggtcaagtccaggacgatcgagctgattaattacgataagctacccgccggccaaaacgcaacggtcgccgtcatgagttattccggatatgatatcgaggatgcgcttattcttaattcagtaagtccagcctctgatcgccggacaggatcagcctctaacgatcgtcgtgtcccggtcaggcgtcgctggatcgaggattcggacgatgtcaagtcttccgaaaagctgcaaccatgctacggaaatatccgaacggaacgtaagttcccctggtcgatcgaactgtcgctatatgtcacactaaggaattatccctccggcccttctaaggtacgatcgtctggcagatcccccgatggttgagtcgacccccggtgtttgggagaatgccgaccggtatcaaatgatcgaatcagatggcttgcccggcgccaatgcccccttgcagcctggctgggtgtatatcaacaagcaaactccgacgagttccggtaatctgcccgagggtgcgcgagtaacttggaagaacgctcctatgtccaacaaataccctctgcggacttacgtcgacaaggttctcatctcccacacggaaaacgaaactcaactcctgaaggtactgcttcgtcaaacccgaagaccggagttaggcgataagttctcctcgcggcacggacagaagggagtctgtgggttgatagtgccacaagcggatatgccattcaacgatcagggcatatgccgtaagtcgacgatctgcacatcgaatttacaatcggctctcacgcgcttcgctttgcagccgatattatcatgaaccctcatggtttccctagtcgaatgtaggcccggaaatcggctcatcgcggtcgcaacgtgtagctgacttaggttactcgtaggactgtcggaaaaatgatcgaactgctcgcaggaaaggctggagttctcactgggaacctgcaatacggagtcagtcttgcgcgaacatcccccgtcatcatttgtcgttttggcattaataacggtcgacttcaatagacatgtttcggtggttcaaaagtcgaagacatgtcacgcttgttgatcgagaacggctttaattacgcgggcaaggatatgcttacgtccggtattacgggtcaaccgcacgaagcatatacctacttcgggccgatctactatcaaaaattgaagcatatggtggtcgataagatgcatgctcgtcctacgtacgtttcgattggcgtattctttagggagtcttaaagctgagaactcttcaacacatagcggcccgcgagctttgcttacgagacagccaacagagggtcggtctagagatggcggtcttcgtttgggagaaatggaacgtgattggtgagtccgcgatccctgtcgatacagctgtattgttctaatgaatctttactgcatcttcctaaacccagcctggtcggctatggtgctacacaattgcttcttgagaggctcatgatttcgtccgatgccttcgtcacgaacgtttgcgagaaatgcggacttctgggatacaacggatggtgtccaggatgcaagagcggaaagaatgtcgttgatctcacgatgccatacgccgcgaagttactcatgcaagaggtgcgcatagcttggccttcggtgtgtgaacgaggctgatcgtctggctatattaatagttgatgggcatgaacattctccccaaactcgttctggaagacgacgcgtaatgccagctgctgccgtcattgcgccctctttacgcatctattccgattgtacgcattttaacgccacttcatgaaatttgcttgcatcatcttcgacaatccgagcttgtggcgttgtcgggtgaagacatagagcattacacatccgcatgccatagtccgagtttgggtagcgctgatggcaggttacacgtacaaggtgggcttataatgcaaggagcgggttgggatcactcttatcctcgtccatgggaagcccaaagacgtctgcccaaaattgcggaagtcccatggcgtccaccgagcctctggctccggcagcattctccatgactgcgctacgctgggtgacggggaaaacgtgctggaacggggtaggatcgacttcttcgggaagccgtcctgtcacgttcaaagctaatgagcttccggcgcgagggaccgcatggctttccatcgtgaagccgggggacgtcgggatactgttcaacgaggggaacgcttggatagcagacttgttgaaatatcggccggaagaggtcggtctgacactacttcccgtgtccatctccgatggaaaagtggttccggagctatcggcttctccagggccagaagctgctgcaccttgttgttgagacgcagctgcagcctgtcgctgtcgggagagctttgttgcagtcctaaaaatagcgaaattgttcagacctggacgactcttttcctagtagcatcgcgacgtacgtggccagtctttctaacgagaccaatccctgacacaggtgaccctgtacgggatgtgctttcaaccacgtacggagtcgacctgtgaagatcatgatggcgcctctgatatcctcctacaggttcaaagattcatagcataaggaccagcatcggtgagatcagcttgatagttccactcaccaaacattggattgcgatactcttgtcaggttgacggatggccaagaaagcacaaaccgtctgcattaaccacgtacgtaaagcggtcagcctgagacaaaaaatcagaatcttcgcaggtttaagactaacccctgcatgaaacgctctcaagctcattgtccacctgttacataattcgatcagacccggatccgaacatgaggctctcaatcagtcggctcaccagctccaagcgatcgagctcttggctcctgacattgccttgaaggcgcacatgatcgcatgagaagcatcaaaacatatttcggtagaatgcgtgtacgccgagggatccacccgcaggtacggccgatggagaatgagcctaatcatttgaactttgacgcaaagggctagagtctgattgatctgccattggggtctatgctggagaagcgtctctgcagtatcgacatccgggtcgaagcgcatcccaggtgggatgaggttgtaccatgcgaggatatccccatctaggcgtagcgcgtcatcataggtgaatgaccccatcgaatttgacgtgtcgatcgctccttcttcagcggcaggcggagcaaaccagcccttggctacagatctgccgtatcttcggtcttgatggaaaacccgaccgagtatatcaagcgaaggtattgttaaggcgaagtaagctgcatgataggtgaaagtggtggtttctgacgcgggatggggatacgtggcatagtcgttctggtcgttgatgtgctcatctggcctatcttgcggaagctgcgtagtgtagtaggtgattgcggtcggtctgcccaagcttaaacagagtagagcatctagacccgcaatggtccacctgtcctccataacaccgtcagcgtctctagtttctgactgtcagtcttcgaggacgcaccaaacacggcgcctgacctcggcgtccttaaacgaaaggtcgggatacaagtgcaaagggtctatgtgcagacccatggcaacagcttgccggatcacaatccctagttcaggccaagcatcagaagccctttcggaattaagtagatagatgaccatcatgatctgaagcgcaacagagtcgggtaagtcctgggaatgtggccctgtcataatttgacttgcctcagaagtaatggtagagatcgttggcgacgacatgaacgagcatagtcgtaaggcctgataggcgccggacactgaggcaattcaccacgttggtaagttgttaacgaaagactgaagactcaacgtctcacagtaaagttcactctgcatccgactacatgtaagatcgtcctcgtcatccgagatgctgagcgatttgtcgttgagcgatccgaaaatttccttttccgaggctctaaccattacagctagcgagcagaccatgagcatgacagatagggtgcccagagtggtcatcatctggtcctcgttcgaaagctcgaagaaggcttcgaattccgctttcagtgaaggtagatgccaggctgagaagtacctggcaatttcttcttcaaaactcatccaaaggctgtacaagcatgattgagggatcagattcaagatttctgcgtaacaacccaaggcctgctcacactctggcctgaacggggctaggcagaattcccacaacctccgagctaaagtgctcgtgactccagattgtggtgaaggggaacgtcttcctctggtcggggaaaaacccagtgaaggccgccgattcgagcggttcgccccggtggtcatcatgtagatcccgactattggcatgggacgcggtcagatctgcgagctaggagtgcgaaacaaagggtcaaatatccgttctgcgcgggagaatggagcctgctatttacccggcggagcatgttccttcccccaggtacgccactgaaaatgtcatcatgtcgagtcaatgatcattcagcaatacatgcgaattttgcttacacgtaggcttggcggccaagcgaatcgccaattaaggcttccccaggtgatagcaaggtgtgtgctaggtacggctcttctccatgctctggactggaacgcctcgaccctgaaccccaagtccgcatggacgttcgtctcgcagggctgtgattttgtccgtctgacaccgacgttctgcgtgaagaggaggctgagagcttgccctccttcacaaaagtgtccagtttcgttgaagtatctccaggaaatttccgtttcttgtgtagagcgggatccacaacttcggtaacaacagctgtcctcatagcgcctttctgtcgcagctcacgcacgacctgttccagttccgcgatacgatcgcgcagatgatcgttctcggactggtcagggtcattcctttgacgtgggaaacatcagtgttgcgctttgggaacttgatgcttgtatcggcttactcgtctcggtcatgatcaacctcatatacgcaagaaccggttagaccgagagctttacaccgtgaacaaggcttctttcggtcacactatagagtttgggttaaattgagcgtgtgtttctgatccagacattgttagacagctaacctttctcttgttttggtgacagggcagacaactttgaattgtcctgttcctcttgcgtttccgatagtctcctttcaaagtggtgtctgttccagcagtgggcacgggagcatttccaggaggaatgggatttgtcagatcacttgaaggtgtctcgttgaccgagtcgtcggcacgcagggcttgtcccacagcatgcatgtctacatggctcagggattgctgaacggactcgttcttcgaaccgtcgttttctgcagtcggagatccggctcggctgttgagagcactcagcgcgcccgaatacgaaaatacaggggcggccttccgtttcctgtcgggggagttgactctcgaggacgaggcggaagtgttctttttcctgctgcgagcagcagcctgacctatggtttggccgtgtcctgccccggtatgcagatccgccagagcgtgttcgacaccgctgatgagaccagcgtggtggccaccaggcatgttcatatgcttttcgggcgaggttgggacactcatgcctccataggaaccgggatgttcagtaaagacgggagtgacagtgccgcttttgttcggcgtatcccgcatttggcgcccttgtctctcaaccttgacttcgtgggagtttgtgcctccgtgcatgtccgaattccgtcgcgattgaccgagtgaatccgtccagtccatggcgtggggtccattcggatttgatgtggctccgagaaggggtgtattagctggcgatggttcaggcaagccaatgtgaccccagttcggggctacgggcgttggattctgtgacataacaccagcttgaaagattctctgatccccgggcggacgcggagccataccagcgatgcttccagtcgcgcggttctgctgattgagacgcatggcgatgctgccataatccatactctgggcgagattcgtcgcgttgtggggtgcggtggagggagaggcggaatattgattgaccgggctctccatcaatggtcggctcgatgagctgctgggtgggccctgcggtaaattggctctattggaggcaagaggcgtcgtgaccggactagcgttggttgctctcatgccgtctgtgaaagggtgtcgcatgacggatgagccggcctgaccagagtaccgtgcgtcctggttcgtggcgggcgcttggggaactgggtcgacccactgaggggccgacatttgtactggcatgccgttctgatccactatgttcattccatcaaatggcccaccagccatgtttcccgcataaaattcccgcctcgggccccgctcagcacctgtggtccttccatgaagacctgtaggcgaacctgtaccgggaaccatgggtatgtcaccgcctggtgccatcggtcgcatggcaaagttgaagttgcccgtgttcatgccagggaacacacctccaccactgctcatcatgctcgagctgccgctcatcccggctgaaccaattcccatacctacgccttgattgaccgagtaaccagtgaggaagttcattagctgctgctgcttttcgtgttgcggaagtgattgctgatccggcagaggagcggcctgcccctgcatgtttccataagtctgcattgttggatccgtttgagcggtatcaggaaccgaggcattcagaggggtctgttgagaactgcctgtcgccggtggggcagtccgtgtaggagttggggcgaggaatgggagtgtaggtgtaagtgtcgatgtatccgagctgttcttgcgccgttgagactcgaaacgtctggctgccaaggagggagctgttctcgcctcggaagtcggttggtgaggcgaaggttgtgaagccgagcgatgtattccgagacccaatgacatgggcaaccgaggtgaactacgagccgaagccgaagctgttgtatgggtaggttgagtcgatatcgttggcactggctgaccaatgacttgggctggcgcaacgccggtagaatcgatcgatggtccagctgccacgggctcgtcggacgtggaggtagccatgacgaacagcacttgcggcaacggctggtgattcacggggatggcaggaccgcttgtccggggcggggaggttgtcaccgcgtttcccaaggcaaactcaagctgctcggagtgtgggaaatgtgacccgttaggaaagggcagcaggcgacagtggaaggaagcccacggcctgtcaatgaagtattcctgcgaagaaagatccctagcggcggccgaagagtgctcgatcttgtgctgttaactgcctattgcagttcgatgtgaaggaccaggcgggagattactgcagatcgaagagaagctgccggtaccgagctagtatggcgtaccgttgccctgaatcgattgccgttgttcccttctaagccgttgcggctggtgcgtccactttgagcagaatgtcgatggtgacgatgaacgattgcggtgtccttctccgccccgtccgcctgtgtgaatggggttgtggtgtgtgggatccaggccaactagcgtcgaaatatggctccgggcctccaaagccgagttacctgtggcgccggagttgcaactgaatgtctaggcgtaattctgcgggtaacgtccgttgaggcgtcgaacgatctacttaggtagtctcttcctggtcatgtacgagacgagagccgtcgatacattttgcattagaaagttggcagcaggatgtatgacgcatatgtcgttgacttgtgtggcatcccagatgaacgagcgaaccgcgagccgaggcgaacctgatgcgagagccaagattctcattttttgattccgtcgaccaaaagtcgaagtttactcccgtcagcttgtcagtagtaagtagattattagtcgtaatgaccaggagtcgtggcaagccgccaagtcgcagttcgtcacagctggaactggtcgtcagacggtcgcatgtcaggcgcagatcgaggatccaaaagcagggaaacatgagtagcgagtggcgagtggtagcagtatggccagccagcgatcgtcaaaccaaattcgctcttatgaaaagtgacaggagatcacgcctgcctcacaaccgaccgatcgactaagatttccgaaccgaccatccgaagtgttagaactggcaagtcaaaatcttcgaaattgcgtgtttcaaaacggtttcgatttgatccatatgatccgcgatcgcataaatctccgccccgatccacttgcccatttggacgatcccttagaacttggtttcgtgtctgccgagccgaaattcccactcttgacaggcaaccttgcgatgccgataggttcggtcatgaccgcatgaccgatgtcgctagatactaaaagcgcgttttcggaaccttttgtgaaagaagcgcagccgaccggaagcgaacgccccgagatatctcagcgagtgcaacccaacttttgagatccaaccttgcaacttacaatcgatcgtgaatttcaaggtcgacgttgctaggtcattgcagattcttctcatctcacatcgttttctaaaatctgtgctgcataatatagattgcaagtctttccatcaccactcgctcttccggaaacgcttcaacccaaaggaatttgcagaagctcgaagttcaaaaagatgagcgaggaaaactctcaagcagcagggccatcctcatctcgagagccctcggtggacctgttgttcgaacctcaaaatgaagagatgccagcgaaacggcgtattttgagtacggctaaacctaaaaagtcgaacaaacctacgcccgggatcatctatatttcaaggttgccgcctggcatgacgcctcaaaaggtcaaacacctcatgagctcgtatggtgacattggtcgagtgtacgcacagagaaaagacggcgagtacttcggcttcgagtcagcctggcctcctacgtagcccgatctgattgggcctgctctcatcgcgacatgtagcccctacagagtcgatctccaagctgcaaccaaagaaacaccagtccgcaaacttcacagaagcatggctagagtttctcgacaagcgtatcgccaagaccgttgcacctatgcttaacgcccaattgatcggaggcaagaaaggagacaggtggagagacgatatctggacgatgcgctatttgagcgggttcaagtgggaaatgctcggagagcaggtcggtgagtttggatcgaagtaaagatctgggctcaagcatgtcactgacacggagcgcgcacattcatcacttaccttccttgcctcatctagcttacgaacgacaagcccaccaagcacgcttgcgacaatccctctcgcagtccaagacagagcaggctgaatatttgcgtaatgtcgagcttgctcgcgtcctagacaagcgaagggcgaagaaagtcgagcaaggagaagaaacaaccggcccatcgaagaagaagccaaggacagacggtggcgcacctgcgctttcgagcctttctgagactgtcggcagtgacaaggcgaagcgaaagtacagacaaagagacctcgccggaagcggaaatgcggtaggagcatcgcagaacaggccaggttcaagcagcggagatgggtcaaaggcgttgcaaggagtccttaacggtctattctagcagttctcgagacttccgcatttacggcgtccctcataccggccgcgacttgtagtaaagttgatacactgaggtctaagtttcacgtcgttcgatctgtatgaaatcaagatcaagcgctcagaatagccgcctggctacctttttgccgtcaccaaaaggatccggactttctgccttccgtttggtaccacctcccgccgtcttcaactctggcttcccttcggtttcatctggcgctaatgctcgaggaacgagctccgatgtaggtttaggcaatttgatcggggcggtcggcctaggatcatcgaggaagaattggtgataaagcgcctaatattgtatgaacactcgtgagctctcttaaagattctgcgatggggacggcgcgactacctacatttttggccgtgatacgcttcaaaggatcgtatcgaagcatctccttgatgagctcgacgccaactttgccgacgctcatgatccacggcgtccaacgttggcctctgctctcttcaccgacgttcacataatcagggagcagcttgtgaccgggccattcttcctcagtcggtgttcctagcaccgtgataatctttttcaactgatccatgtcggtctcgccgggcaagaaaggcttgcgcagcacgagttcgatgaatatcgtcccgattgaccacatatcgactccatatgagtatgagcgcgagccccagaggagttccggagaacggtaccatctacgatttgagaagctcataagtattcacatgtcaaggtcaatcacgcaagtcaatcggagacctacctcgtgaccacttgacacgtcatgcggctatccacatctccggtttccctcgcgagaccgaaatccgctagcttcaattcgcctttgctactgatcagcaagttattcggtttgagatcccgatgaagcacgcctcgcgaatggcaaaaatccaggccgcgaagactcatcgccatccagctcttgacgtcgccaggtttgaagaccagagtcttgtctctaatgaccgcctcgagatctgtatcgaggtactccaagaccaaggacagtgactgtgcttttgaataggtgccgaggagagcgatgacatttgggtgtgagagttcgcgtaggaatttgatctcgcggatagcggagatatctatgccatctttgaaggctcctgccttgatctttttgatggcgacttcaaagatgttcttctgtcaacaccctcgaaacgatgtgtggatattgtggggaacatcagctcactcttttgacctgtcttcacatcatagcctgcggatgaagagaactcgataagccccactgttgcgatcacagcgacagacaggtccttacccttgtaaacgttggcataagttccctctccgatcttcgtttccttgaccccttcagaggaagtgagtttactaaatcggccacttggtacggtcgggatgccatttcttacagcgggccctggcggcggcgttttctctgtccgccaaattcatgcgaacattctgtcacttgctttctgcacgtaagttgccaatatttcttgagatcccacaggtctattctacagctatttgagaaaccgatcagagtagcagttgcagttgaaatcgaggatgtgattgaactgactgccagaagaccagctagccggctgaagctatagctatggttcaagttccacggaagtatatcagcatccgagcgggcaggggctcgatcttcgaatgataaccttttagctttcattcatggaagtcagtttaacgtgacgtgtcaatcatttaactctcgctcctcttgggtgactgcgatgatccgtgacgtttgcgggctgcggtatctggcacgcggtgcaccggagctgccttggtgtacatgcatacatatggttgcaaggcgtcggaccagcgatcctcacgtattcttaccaagtacgaattgccggactaccaaatctatcttgcttctatcatctaaacgacatcacaatcgagatggctgatcaattggtatgtcacgttgtgtgggggccgttcccatggcagagttcagccgattattgacgatcttgctctttagactgaaggtatattctgctattctgctggtaacgaccactttcagatcgatccatgctaatatcgtccacgtcattttgactgactcgtccctctagaccaaatcgccggtatgtcacctcaagaacatactcatgcgccaacctgaccaagttcgctttatctgccgccctcaatgacgcgattcattgacgtcaaactgttttggttcgaccctacccattcatctcgtcccgaaaccacctcaatccccccgtcaatgacgcagagttcaaggaggctttctctttgttcgacaagggtaggtcacgcatgcaataaaagctcatgacggttagaactgacggcatatccgacctcggcttccgtcacattgtctcgactttcctataccatcaccatctcactgtttcgtccatggcgatgaacaacttgagacagatggcgacggtattatcacctccaaggagctgggcaccgtcatgcgatcgttgggacagaaccccacagaagccgagttacaggagatggtgaacgaggtaggtacccgttaggtatgatacttgacgaggatcaagctgaatatatctgcccacaggttgacgctgacggcaacaactcgatcgatttccccgagttcttgaccatgatggcacggaagatgaaggataccgactcggaggaggaaattatggaagctttcaaggtgtttgacaaggacaacaacggtcaaatcagtgcagcggaattgcgacacgtcatgagtgcgtgtttcacgggcttctcaccccgctgcaagtaagcgtgccgctgacaaacgccgacttcggttgtcacaccttctagctaacctcggcgagaagctcaccgacgaggaagtcgacgagatgatccgagaagctgaccaagatggagacggtcagattgtgggtatagcttttcagcttatcattgcgaggaaattcactcactcgtctcgtacaacagaactacgcggagtttgtcaagatgatgatgcagaaggtgagtgcacattcgcacgcagaaaagtgtcctagggattctaaaactgcgattgcacagtaacttcgtgtctgcgctgtgtgcccgctgcgcccgttctcagactgggatctcgagaatcgtgggatcagccactacgcggtcacctgtatagtcctatgactttccgctttccgagagatatggaatctgagtgatcaatgaaggattcggctcgacgtggaatgataacaattcagcgaactttcacgtatcgtcgaggctatggacatcgccgttgggcaatatacgggtaaattacgtccgagtgtcggtagattgcatccgacaacatcaacatccccctcgattctccaaggaaagaatgtcgatttatcgtagaatagagacagactatgatgctgaacagatgtgtgatcacaagctatagcccgcgcagactccccggttcgtgtcttacctagatcactttttggtatccgtctgtagcccctcaacatcggacagtgcggacttagtgcagccgccgactctggcgacatcttcacttaagggtcggtcatcgcctcgctgcatcatcatggacgaaaagtcaatcgaggatgccttcgtacggacgaatacgatccacctgtcacactccttcgagcttcactttgcggctttgaaccctactaaggatcttgtcgcgctgtaccgcaatcttccagcaatcgaacttcagcaacgtcaagcggccaagctcgcgcccaatccttttgcacgccgagctccaataatgccctcggtcaaacgcaaggttctaactaaattcagaggcgaaggacatgaaatcgcagaagatgaagacgagacagcgggtgccatttgcattgggctatggaggtcaatctccaatgatggggcttccgatgcggcaggtccatctgtcaccccacccatttgggaagtagatatgattggacgagagctgctgagtatgtcttggaatgtggaaggtatgtcgatagtcttagccatccgcattctttccagcggaagggactaatcttgcctccacaggcacattgttgtcggtgctgctctcgtgtaatcccaaagagccctcacctcagagaagccttttgaagttggcgcacttgtcgctccaagacggtggcgtagtggatgtgtcgtatattgcctcaaaagcttcgatcactgtcggaccaactggggagatgttttggtcaactcgactagaagcagttccctctgccaaggtaaagttgcgcgaccgctgtcagaaaccggcacacgcaaactgagctcttttacattgcactgtacagacaagtaacaggctgttggacgtccttgaatcgttgccgaaaccaaatcacgtagaggattaccttccagcgatgtgagcactctctatcgctcgcccatgcagaccctggcttgatgtgcgctgcgactctagacatgccaaactcaatcagaaccgaccggcagttgataaatccacgccagccctcgtgccttaccatcctatcttagggtctttccccggatgtgccaaaaccgttggacccacatctgtgctctgcatatcaggtcttgacgggaaagactctaggggtgctagcttcctgggaggatcgttccccctgccatatcttcccgagacgcaacaagtgggctttgagagggtactctccagcgcccagctgtccagtgacgaggaaacaacacagatgcgaaacgcaaggcccacgacagacgaaattacgatagctgaggcgagctcggctgcgaagagctacttggacatgattttgcggagtatacaggcttgtcaaggtatctggcgggatgatattgacaaggaacacgatcgatgggttgatgaattggaggatgccgctaggacccatgggagtatgttgaattctggacaggccgcccaagctaaatctgcgagcttattgagttcgctccattctagccgatttcgaatccgcacatgccgatctgacccgtctgcttttaacgggtcgatgtagtgaaggggtcactcaattcctcggtggcagaatcacagacaaggtaagttagcaagtctaataatcgcgaacgcaactcagcgatataccatccagacgctcagtgcttgggaaacgacttatcgtgaggctgtgagacggatacaaaacacgatcaaattcagtctacttcctgcctgtgaaagggtcatactggtcatcgagtccttggtagggacgtcgatcgcgtgagctccaactccagcaagaggtcgcaggctaaaactgatttcaagcctattcagcacggaattgcctcatgtagatctggatctcgctcgcctcaaacgatcgttagactgggcgaggcatctagctatcaaagcgaacgatctcgatgctgtgctcggcgaagaaatcagtcagttccgcgaattcgccaggtggctcagatatggtaagctggcatctgaccatgtcaaggactcgatcatttaatgtctggcctgaacgatcactttccagagatcgctcgcgctgccgctggccccaacgatgatgaatcgctgccatctgctccctacgatgtgctctcggtttgcgattatctggtaatcttcccggctcctccatcagccgcgttcttcctgaccatcgaccagcagattggggttgactggccacagccttcgcttccgcaagaacgcacttgtcctgatctagctcagacaatcaggcagcgaaaagggttggatgatggcgcaaatcccgccgcgcctgtgaccactgcacagagacccctggaagaagtccgaagtcaacaaagaagcaaagcgttgtcgaagatagccttgtggagtatcgccgatgtcctagtgcacgaactggcctgtatcttcaagacggctatcacatctgacgtggatctgcctgcaagtccgctcgacagcctgcgtgctattgtgacccccaggggagggcacgtcgccataagacactctgcagcaggggtcagcctctgtttcaataaccaccatctttctgcaggtccgctgaaactagactgctcttacagaagcttcgcgcgttcctgttaatgcccgatgtcaaccgctgtgagccagagatcttgagcctgatatgcggtggaactgaggctcgcttgcagtttggatatggaccagcgatcacccagaaggtcctgtattccgatgtgttcgcggattctctctggatgctcggcctagtgatgtggagttcttcgacgagaatgagatcatcatgacagtccgatcgaaattgtctgatggaaacggtacgtttccggagagcaaacctgccacgttaagtctggccgaactcatcgttcggtcactctagctctgtaccttgcgaccattaggctggactcgctaacgttcgaagatgacccgatcaacgtaacgcttctcgaggaaatggcatacatcgcagagcatggcaatgttgctgaagtgagcttcgatagcttttctgttaacgatgtctttcacgctgatggtttctcattcgccaggtggaggcaatgagggatataacggacattatcgagcgggcatataaggtcgacaacttcgccggctccagttctggaaagcgatgcttggcctcgaatggcagagcgaaccggcgattgatatgcgtcagcatcaattccggaaaggagattggggtattcgagtaatagatcgcacagcagatgaccatgctacgttcctgatggccatactgtagagcagagcgatgcgggagttttgaaagatcatacaccaaatccatgtgccgagatacaatattagttgtgcgcgtctgagatgtataagctatactcagaaaggatcctcgaacacgtcatcgggcgactcagcctgtgaccaccaggattcctccgaaggcgattcctgagccgacgtttcttcgccctgctccgtccccataccggctgcagctcccaccgccgcccccgttcccatgtcgcggtggagctcgcttgacccccctccccacatgaacatcggaaagcccataccggaaccagagtgtcgcgaaaagtaatcgatgtcaatcgtcaccgcggtagcgagagccatagcccgctcatcaagcgtcagatcggtcgcttggcgcgggatcacttgcgtcgcactgcggctgtccggcggcatcggtggggtgatgggaagaccaagttcctcttgtacggcatcgaaacggatcacgtattgccctgattgcgttcgaacgggtccctaaccgaatcagcgcttagctcggcgagttagaactaccagcaggacacaccggtatcagtgaaaagttctcgagcgataccggcaaagttgcgatcaatcgaagcgatcacgtctgcgaagatgctcatgagtaccctaacacgaatgaatttcacgatgtcgacttactgccttcgctattttgaagcatgaatgtccaagcgaacaagccctcgtcgatgcgtgcaaattgcttgtaggcatcttttcgactgaaaacgggtcgttcgacgcgagacatcagaacgatgtggacgagcttgtcttgcaaaacgacctacttcttgaaaacattatactttctgcgccacggatgccattcttgctgtgtctctcccacaatcatccttgcctcgtcggatccagacatctgggattcctgtgcatgcacatacatgcgcgagttgatcaaagcaaacggacgacggatctgtatagatcgatcgagcttcagtgtccacattgcgagctcggagccctgcagaaacagatctagactgacccataagacggggttcccttcacgatccattacgacggctctaggtggtcaagccattcgtgaccatgccgaagaatcatcagtaccaacagtgagagagcggccgggcacacgaatcttacttgaaaggtctgtgtgtccgcaagacttgtcgagagacggtgctcaaaatcccctggtcttcttctgcgagatagccaacatgctccccgttgacattcatgatggcataacgattcgcctgctcgaatcccatgaagacgttgagcatctcaagctgcctatccgagcgattagacctttcgtcaacggcccgttgtaaagcagcggggacactcttccgagttctgccgcgctctcacctaacaatgaccaacgcgctgttcgtcaacagtctcatagcgccatccgttttcttgaggataccatttggatcactttgaatcgataccgggcgtaaaagacccgtattcggtagtggggcgtcgattaatgggttcaacgaaggcgaatgaatgtttggcgtgatttgcctatcgccaactaagtgtcggggcgcccgggaagaagcgactccgtcctcgacttcttttctagtccttctgaacgacctcgatgttctgggaccagcatatagcgcttgtgcagtcgggagcacatagccccggcgggatgcgatcgagggtacccgaacgggcagcgatgatgatgatgctaatgatgatgatgatgatgatgatgatgatgatgatgatgatgatggcaaagctgttgagcatatgcggccaaagttacctagactggcggcttcgaaaagggaaagtctcggcggcatgtctgaacacttgctgaaacttcgaatgagataatcccggggataggcgagagaatcaggatgaacgcgagcaaatgccttgtgatattcccccctagcaatcaagaggatcgatgaggttgccccgattccatgtcctgcctgaacctgcctgtccagtatgattctgaacaacgatgacgaaagtgcgtgttcggcttcggctaaggacgggaagaaaaaagggaggaaggggggcggtgacacgtaatggaaaccagccacagccgaaccgcgaggggcgacgcgaatcgagagagacgaccgggtcagtcgggctatgcgtgtgatggctctggcttggaccgggggcgggcagtttcccgcgctcggggagtcgatcgggaacttcggaccggaggaggaaactggtcgaggtcgacagggatgttgcgggtaatggatataactaccaacaatctgcaatcacaaatcacattcggtctggcgctgtatttgacaagcgaaaagaatacctctccgcctacaaccaaacggataagttttccagagaccttttctcaaccacccaaacccgtcacaaacaaccatgtcttcttctggaaaagtcgttagcattcgctgccatggacccaaagatctgcgtcgagtgagtcgagaccacatcggtcattaacagcagccttgtcaagatagcgatctgatacggaagatcctcgcaggaagagcgcgaagccgtggctccaggtgaaggcgaagctacggtcgctatcgaaatgaccgggatctgtggaagcgatcgtgagtctcgaccatcgaccgcgcttgtttggaccgacctctgacggctctgcctatccagtccactactatctccatggggcgaacggcgacttcaagatcatcgatcctctagttttgggacatgaagccggaggtatcgttaccgccgtgggaccggagcccgcttcgcccacttccaaaaacgcccacagccaagccagactcaaggtcggcgaccgtgtggctatcgaatgcggtcacaactgtggtggttgcaggatgtgcaaggaaggtcgttataacctttgcaaagtgagattgctagcttctacatcgcaaatcgctcggaggtagctgacccaactccgctttcacctaccccgcccctggcagaacatgcgattttgcagttccgccaagactcatcctcatcttgatggtacacttcaagatcagatgaaccatccggtcaatctcctacacaagtgagtctgttcacttgtcgttcgattgaacctcctgcgtagctcctgttgctcatcgttcaactattcaggcttccggatggttgttcgttcgaagccgctgcgcttgcagagccgctctgcgtcgtcctgcacgctattcgacgctctggcttgcgagctggagatagagtcctggtactcggggcgggcgccgtcggcctactggccctcgctctcgctcgagcacagggagcaaccactaccgtggccgtcgatatcgaccaatctcgactagacttcgccaaggagaacggctgggctactggaacgcactgtctcgagagaggtcctcgagtttcgggagccgatgccatggcagccggcaaaaagtcgtgggaaggactcaaggcggacagtgttgtcaccgaggtcgaagaactagacgaaggctttgacattgtcttcgagtgcacgggcgtcgaaagctgcatgcagatggccgtttacgtgagcaagcgtttccggtcccgtctgcgttctggcctgtgtagctgatcgccttacctcacgtcgatctggactaataggctgctcgagctggtggaaaggccatgtatattggtatgggaacttccgccatgcttttgcccactgggccttcgttaatccgcgaagtggacatcatgggagttttccgatacgccaacgtctaccctgcagcactggcattgcttggttccggactgctacagaacgttgaaaaaatggtcacccaaaagtacacgttggaccaagcggaggaggctttcggcgacgtcgccagaggcaaaggcgtcaacggcgaaatggttgtcaaggttatgatcggcaagcgaaattaggatctcgctgtcgagcgcgctatggcttgtaagagtagctgttttgtatgttgcggtcgtaagtgtacataaagcatggatcctcgatagactgcctctttcgcagttgtgcccgcttaaatctgagcggtgcctaatgacgcatcatcatctgagtcgcttgtcgccttgtcatctgtctgagcggtcgcccactccctcaacagcgcttttcgccgtgccttccgattagaaccaggattcatgtacctgtcgccttcgggcagttctttcttgagttttgccctgcgttattcaaaatttcgcgtcagtatccaacctgcaaagacgcacaagtaccggtacagaccttcggtgacctcgagaccctacgtgagcatcccattccaacacgccaatcgaaacgggtacattaggtagtgaacaaaccgggcagtcgcggcgagcgttgatgacttggcgcctgtggcattcgacatgagctacggacttggagaacggagtgctagcaccacccactctgcgataccagggacgccgatctcgggtatcgtctgtgattgctcaaggggtaacaacagatcaccggtgtcaggatggcccactagttggggttgaggcattgcctgtcgttgaagaaagtctgcaaagcgattctccgagtttcagcgtgctagcatagttttcagacagtggtgtgctgactttgtatcagatcgattccttcctcgctacgaccagccggtaagacgtagatatccacctgacctcccatttggcgggctttgcgcacggctggcagtaattgtttcctgatccacttgatttgcttttttgcgtactgcctcgtcgatagcttcattcgctcaaggcccgaagcgaaaagagggtgatcgctactcaattcttctgtagggatagcggcaaattccttgtacccgatggactggaagattccttcttctgggctggcagaactttccgatccatatatacgggctgcatgctcccgcagatcgatgatctccttgaccaagcctttctaataacgtcctacgcagattcagcgcatcgcctcctcgtcagtttaaagtcgagctgatacgtgcctggaccatagcatcgattctctcatcgagcctcctattcaaaacgtctggtgtatcatatacccataaaatcaaggtgcgatatctacgcaagggtgagctgattagaagctgtgctctagaacgagatgttgttcgtacctggcctttccgctctccttatcccccagacctgctccagtagcatcatcactaattccaagattacgtttggccaacagctcgctagcccgatcctcccaccaacgttccacagctcttcgaactttgcgcccatctttccaatgccatcgcgaagattcttgcagatcaagctgttgtagcagtcgatgcatttcaagaagctgcgagtcaggttcctggtgcgtaggcttcatcgtccggggcgggttctgaaccgactccccgcccggtagaagactcggtgctggctgatagaaggtctcgaggagatgtcgactacgagagtccaagccatcggttagaagaccgttactctcgatgtcttcgagagtgcagggaggcgtccacttcgaattggcaactttacttcgaccggatgcgttcgagctttccggccgatcgatagatagatcagatggggggaacaagaagtgttgcacgtagtagtgagtcccgccgcaaatgataggtaaggttgtatcgggtagcgactctgcctttggaagggacaagatcgaaatcgagatcggaatcgacacatgtgacataaggatgcggacaaacataaacaaggtcgaggaacgcactttacatagtgcttcttggcaccacttgcctatctcccaggatccaccttctcctggtcggacgacattgatgccccaatgctctataccacccatctctacgtcggtgaccttgttggtgatcagaggcagtccttcgtacagctgcatcgaatctgacgacagcacaacagcatcgttgagccctttatttgtgctcgatctcagatgctgagccagatcgaccgccaactgggatttgcccacacccgtggtaccgatgacggccacaatgtcgcgctggctccggttgttggagttcattcttgatgcggtgtgcgcgactgctcgggcaatgacgttcgctccgcctagccttgtccacatgaacgatccgaggggggagtggccatggataggacggctgatcagtagaaagcttgaagcaagcacccatcgaaagtagagccctgaactcgaacacctcgaaacaggaacatggtttatttggcaaaaggggtgaggtgctctcagcgctggtaagcgggtaatcattcacgaaccgcggataccttaatcccctcgccattctcctttatccacccttagcctgccgtacgcaacagcttcatcccccgccaaccacatcttggccaaatctcgaccagggacaatcatatcgatcaatcgctcaatcgcgtatatcctgccagctacgaacaggtcgacgccccagacgacatctcgtgaatccgattcgacgcaaacctctcatcatgagagctaatattatccttcgtgccggcaagtccgccgatcacaccctgtaccacgctgaaccaaaggcaagtcttgttcccgaccttggaaacaccctcgcaaagctcttatcctcttgctttcggtccttttgcactttcgctctgtatcaatcagggattctggaagaaatttcgtgagccaatatatgggatccttctattattgacttggaaagtcgagctaaagcgaactcgtcatgcacaggtgatgccgttgttggttagtttgctacatagacatagtcccagcggatgccagctgataggggattttgatgtcgagacagtgaaccccgaaatctcgtccggcttgcctatcccggagatgaaccgtaatcctgcaccggcgtcaaggcccgagctttacgctactccagccactgaggccagtgatatcgccttcaacccggtaagcggtcctgaaaaacccaacttcactctggacactgaatctagcgtctatgtttcaacagtactacaagcgtgacgtgagctaccaaatcgcgttgccgaaaccaactgtggctgatcacccagactttacagttccgcagccaattccccgctacgtcttatgtctcgcaggataagctggcgggtctactgttggcatcgcctgaaggccagaaagcgtgagggtggcgtttagatacgtcgagagaccgttgctcattcccctggtcattccagcttgccttcgaccaccactgacatcgtcaagtctggaccttcccactcgttgaacgaagttctcgctgcccttcccaacacattcgcatcggaaggtgggatctcggtcactgcgactcccagcggtctgcctccaaagccccccgcatttggcggaaagaaatgggtaccagtgccaggcgacgagattccccacgctcccgacgcgtactggccaatggtttcgtaccgctagctggttaccgagcggctgggatagctttatcgtgccccaacggcgaaataagcagcggcgttgtacaagaaatgatatcgcatgtatgagcgagcgtggagatgagaagcgtcaaatcgctatcccagggccacgctgacgccgtcctggccgcgaaagtacgacagaccagggcctagctggagagacttttgtctcgatatccggcttgctccttgagtaattgtttgaccttttcttccagcgcaattgcgagcgcaacattcgcagactcttgtatttcggttgggaggctagaaaggcgggctagccgtcataccagctgcttgaacagtggatacttgacataaggatatttcactatcgactgaccttctgcgtcggtcgctgaattgcgggctgccaacgacatgtacgatgcaccatcccgcacgtgcatcggatggatttggagagacaagaaatgtctgctgtactcttccactgcttgcaaaagttgctggaccgagcccccgaatcgagtgcggatcagcttcagatacacagcgtgatcggcgcaaagcctcgcaatttacaggcgagatgtcggcaaagcctgtattttgatgcatttccaaaatcattgccgaaaggtgtgcagctctgcttgggttgagtatcaagccatgcgagtacgtgctaggcttgaggtgtcagcgtacaatgttgccgcagacacggacttggtatcgactttctcgatcagcagctgatcgccattcgtattagacgatacgacaatggcttaattttccacaacttagtagctagcagcagcttagtagaagagtgactcatttgaatgaacaacaaacagctcagccgaccgataacacgatcaatctggcgatcagttgggcgacgagtccaaggtcaatcaacacctgagcgagcggtcacgtccacctcaccaccaccatccacctcactcacccactgacggcgccagcagctccctctctcctgaccaaaggacaagtagacaagagcgaacaacggttagagtgccacccactgctataggtcctgtgaacttcagcttggcaaacatttgtacgagtcatcgaggttacccttgcctcagagaagctctaacccttgcgactgtgctatacacagacacatcaagcgtcgctgcagcaagatcgacgatcgttcaacctcagcctgtagttcatatctggaacgcatataaaagggaagctcagcgtgacacggatcatccacatcaatcatgaaccccaatttcgacgatgttgaggagcgagacggtaagcagggttactagagtcgaaaatccctcgcgaacagcgtccttgaacactactgttactcacccgtgtaggtgttcggttctcctggaacacatggccatcatccaggatcgaagcaacgaggactgtggtccccattgcggccctctatacgccacttaaagaaagagaggacctgcctccggttttgtacgagcccgtgacgtgtaaagcgccttgcaaagccattctcaacccttactggttagtcgctagcagtcaacgcaatgttaccaatcgtacagtgtgaatgatggctgatacgactgtatcaacagctcgatcgacgttcgcggcaagctctggatctgccccttttgcctgcaacgcaacccctttcctccccactacaaggacatttcgaccaccaacttgcctgccgagctcctacccaagtatactaccattgagtatactctctctcggcccgcacaaattcctcctatctttcttttcgtcatcgatacctgcctcgatgaagacgacctgaaagccttgaaggagactatcgttgttagtctcagcttgcttcctcccaatgcgttggtcggcctgattacatacggtaccatggttagtctgcgaggattggctgttgcctttcgatcgagcgagctcatgattctactattacatcaggcacaagtccacgaacttgcttacggggaatgccccaaatcatacgtgtttcgtggctcaaaggactatcaacagaagcaaatcgtggacatgcttggtctgaacccctcaaccgcccgacccgctgcagctggaccttcgatgcctggtcaacgaggaggctttcaggccgctgcaagccgcttcttgatgccagtccaggcatgcgagtttcagttgacgcagatcatcgaaagtctcactagagacccttggcccgttgcaaacgaccgtaggccaatgcgatgtaccggagtggcaatgaatgtcgctgttagcatgctagaggttagtggagcaatttcgtccggagaaaaaaagcgcatgttgatcggtttcgccataaatccagtcggcgttcccgaataccggggcgaggatcatgctgtttgccggtgggcctgccacagaaggtccaggcatggtcgttggacaggaactcagggagcccatccgatctcaccacgatatcgatcgagacagtgtcaagcatttcaagagagcgaccaaggtatatgaacggccctgtctcgctcagatctgggcgtgactgacctgtcatcatgcgtaatcgtctgtgttcagttttacgagggcctgtcgaagagggcatcgatcaacggtcatgccatcgacgtctatgccggttgcctcgatcaggtcgggttcctcgagatgaagtcattgaccaactcgaccaacggattcatggtcatctccgattcatttaccacggccatcttcaagcagagtttcctgcggactcttggcaaagacgacaacggctacctccagatgggtttcaatgggacttttgatgtcatcgtgagtctgcgaagcagcccgctaaagcccgacacagcccgctcacttccgcctacccatcagacgaccaaagagatcaagatctccggcgtgattgggcacgtcatttccgtcaataaaaagtcggccagtgtcggggagacggagatcggtatcggtcagacatcggcttggaaagtctgctcgctcacgccaaagtcttcgatggctgtctacttcgaggtcgttacacctgctggtcaacctctgcaacccggtgcgaatggtctcattcaatttgtcacgcattaccaacatgcttctggccaataccgattgcgagttaccacggtggccagagctttcgcggaaggcggacatccttcgattgctgcctcgttcgaccaagaggcagcggcggtgctgatgtcccgtattgccgtgttcaaggcggaaatcgatgactctcccgatgtgctaaggtggctggataggatgttgatccggttgtgtcagaagttcgccgactaccgcaaggaaggtaagctatcgtatacggatgtggaatggtctaaagcgtcacatcattgacctttcgttggctggcggtgccggcgcagacccggcgagtttcaagctgggcgagggattcagcatctacccgcagttcatgttccatcttcgtcgaagccagttcttgcaagtcttcaataactcgccggacgaaacggccttttacaggtaagtaccgtttcagctttcccctcctcttgtctgatcgttgacgggtacggtggtacgtcaggcacatcctcaatgacaccgacgtgaacaactctttgacgatgatacaaccgaccttgatgtcgtacacctttgaccaagcacctcaacccgtactgcttgactctgtctcaatccgtcccgacgtcattctgctgcttgacacgttcttccacatcctgatctttcacggcgagacgattgcgcaatggaggaaggccgggtaccaggaccaggaaggttatgagaacttcaaagaactattggaagctcctgttgtggacgctcaggtatgtcgttcataagagaacgtaacgactgcgatccagaccgcttatccgcgtccttcacattctaggacctcttgacggaccgcaaccctattccgcgttacatcgtctgtgaccagggcggttctcaagctcgtttccttctttccaaactcaacccgtctacgactcacatgaccggaggatcatacggcagtggcgcgggcgcttcaagtggtcaggccatctttacggacgacgtgaggtatgcaaccggcgcaaacgaaatagctgatgcatcaccgctcacgctgacatggagttctgatttccatgtgtcatagcttgcaagtctttttcgaccatctcaagcgacttgtgagtggattgacagcattccttttttgacccgtataccgccgacagttaacgttttatcggcgttcttgttactatctcaggctgttggtgctccctcttcgtaagcttgaggacgcagaaactcgctcccggcggatagggcgaaattgggcgcaatttgggatgtaacctcgtgcatgttatcatgatctatatatgcttgtatcggacactctcattaaggtggacatttgtctacaggataaacaattgccgcgcatacacacatacgtacactctacgtaaaaccccctttgctgtgcgcaagagttcgctcaggctactccctgtcttctgtcgatatcaaatcaatttaaacccactggatcgctacgtgactgtactctctagtccccgcctgagctcggaataagccatcaatctgttagtcgacgaaatggccttctgtaccgcacggatgtggtaaaataagaattgcttgtgaacggaacgcttcgttccgagcctgaaacccgtccgtctttgtacgctttcactgttacaggagctttacaattgatatattattgacgctgacatctgttctaaattgggggttgcatcgccaggccttgcacgtagcgattgcatctcgagcatacacccgcacatccacaacaaaataataatacggtgcagtgcattgagatgacgcacacgggtagtcatcccgtatctatcgcgtccctctccgcacctttactctcgaacacgagcatgtgtacatcttgaccatcagctgtcgccgtctttgcactggctccgcttgctgagcagtaggcgatagtccagatgtccagatgtagacaaccgaatcttggccgtggctagtcgatcgggagtgactacagaattgtatacaagtccgcaacgaacgtaaggaatactgcggactgcttcctacaatctctgtgagcgatgaatctttcgatgtctgacgatcggcgcgaagcgcgacctgaacctggacgcctgtaactggatttcgccggggaggctgtctcgcaaaaggtgttgtagaccattcaagctgacccgtgtaccactctagactgggtagattgcgaaattttgggtggtaatcagccaggtccattggtctgttttactgtcgatcaatcagtcagcattttacatcgacactacactactgctatgcaaatacaatatatttatggtcggcaattcgtcagagtccagccagggcgccctgagcatttgagcaatggcttgaaatgataaagtctcgtagacaggccatttgcttccgactttgcttcctgatggtccgctcgtagtttgatcactgcccagatcctcccattaatattagcagcagatgcgcagtgttcatcaagtatggggatactgatgccagcgctgccacgaattgacggtgagcagcccgtgaccatggttgtatcttccaggatgctgttacgccggataacgccggtgcatgttggtctggtccgtaggtgtagacgcgcatcaaagacgcgcagcgtgagaaagcgacactgccaaggggcgggagggcacagaaactccttgtcccgcgctgtccgctcattcgttaccgcctgccgcgtcttccagcacatatcgaccagttcagagtcaaaagtcacagaccataacacatgcatgtactatgaatgctgacagaagcacgacactcacccagtacactagcacgttatactacgacacgcatcactatgaacatggctgttcctccttcttacaaagatctcggcaagaggttagcagcgccaaaaaaacaaaacttaataggacgcgatatggtagctgatcaaccgcctgccatttcagctcgtcggacttgttgtccaaggactacccgatccacggcacctctctcgaggtcaagaccacttccttccccgccagcttcaaagtggccggtctgcgcgatgctaaggttggttctgacaccggatcggaacattcgatccgatcaaccggggctgacagtgatcctccgttcctgtacgcacagtctgccgccatcaccggtgacattgagggaaagtgggtcgaccccaagaacggagtcgccatcacccaggcctggactacttcgaacattcttcgaacccaggtcgagcttgagaaccagatcgcccgaggactcaagttggacctcctaaccgctcttaacccggccaagaaccagaagagtgccattgttaccgctatttacaagcagcccagcgttcacacccgggctacggtcgacctcttcaaggtgaaattggtttgcggccaagaaggcacgcgtgaatcgtcccacttatgccgtgccatttgatccgttgtcgacagggacccaccttcaccgccgacgctgttttgggccgagctggtgccctcgttggtgccgaggctacctacgacgttctcgctggtgccatcaccaggtacgccggtgccgtcggttactccgctgccgactacagtgtcgccgtccacgccttgggcaacctgtccgcctactctgccagctactaccaccgcatcaacaggtaagctttcttgacattgcaacgtcatagccacttgcggtctatcgaatacaaaccttttctcggcttccttacagcgacattgaggccggtgcgaaggctgtttacgacaccaagagcacttctggaggagtcaacctcgaagtcggtgccaagtcttacttggtgagtattcgtaaaattgcaatcgtcgtcttgaagacccgctgctaattccagcctctaacgcgctcgccacttgcgtcaataggacaactccgctttcgtcaaggtaagttcaaattcttaagacatgctggaaaatgccggtcaactgatcttgactccgttcttctgcttctttcacttgctttccttacttgctgtccttaggccaaggtgtaagttttctctgttgcctctcgccgggttcttcccggtacggcatgctgattgcctcgacattgggctgctgcagtaacaacgctggaatcgtcggacttgcttacactcaggctctccgccccggtgtcaaggcttcgttcggaattgccatcgacacccagcgattgaacgaccgtgagtggttgagcccgagcggaatctgctgtcgcacagactcatcgctgatgcgatcatctatccgttggcgtttgtgggtactgcagagtccggttccagcaaccaccgagccggtgcttcgtttgtcttcaccaactaagcaaccgcgtagcgatagttattcgggtacctggaaactttgtcaggttgtgaggtcgaactgaacattgaaatatcgcatttttagtcgatatctggcttcgcttgtgacgcagctgtcgctgagaatttccttgcgcaaagagtctgcgatactttgaagggcgggatcgatccatgcatgactgatgactgacgaaaggacttgtaaaattgaagcagctcgtggctacagctcttgcaaagcattcggatctgctgtttgtgtttgcgtctggttgttgttgttgccgccccaattattagctaggcgcgccggcacattaaatctattttgatcccggacatcgggccgaatgaatcaaggctgtgtgtgagtccacgatggcgacccgatctctggatctctagcctctgacctcctttcatgcctttcaagaggttagacatgcctcactcatgatcactcatcaattctgtcacacctctctagcttctctgaaataccaagctatctagctatctagctactgaagctaccacgtcatcacgtatatcttccagcccaataccacactgtctctttccgccgcgcagaacgaccgccttcacaatcactttcccacatccgacgcaaacatcaattgatcgaattcccctttcaaatatcctgggataaagcgacctaacctggaactagaccgcgcccttactttacgctactcaacaatgctaagacagatctttgtttcgactttgggtctcgctttgctgcattccacgactgccaagcaatgcgcccaattcgataccagcaataacctttacctgttcggaggtgatcaagactataatctcggtcagagcagctcctgggcatgtaagtacaatacaacattgccaaattttcctggtcaagctgactcgttccttatgcatgcatcagctccatcgccgcaagcgttgacgaccaacggacgacccccttggaccgggaacaacaccgcttgcagtttggctcagtataacaacgctctttacgtccttgatgcagacgctgcgaatccggcagtcagtgcgatcgccaacatatcgtctgcttagtatacctactgataccttctcgcacgatcaggatgtctacatttacgatttcgctgccggtacctggagcaagcagaccacgacttcgcctcctggtgagagaatgctctgaaccgggcttcgcgtaccgatatctgacgccatcattcggggcagatgtatcgacgggttcatctgtcctcgaccacgataccaacgtcttcttcgctttaccagctacgggcgacgacgcatcgctgtactcgctcgaccttagcagtgtgaccaatcaagctaccggtggcgcgatttcgtgggaagaggtgaccaagcctaacttcaagatgaatggccgtcagccggtcatgtcgcaggccagcaatcacatcggtacgtcacgatgattagagacctccaaaagatcaaatgggaatgtccgcaacgaatcatactaacaggatctatcttgtcagttttcttcaatgtgcccaacaatcctgctggctccgccaacgtcttcgttatccactgtgagttccttccagaatcatctcgtcgaacagtgcatagtactgaccgggattcgcgattcacagattcttatttccagccagaagtccaagctttcaccctggctaacggcgccgcccaaaacttcccgacaagccacggtcaggcactccccattccgttggcaagcaatgatgtaagtccagtttgacgacacgtttctcgttggcaggaatcgctcctaaacttcgagactcccgtttgaaggccggcaagcaaatcgtgttcgtaccagatgatatgtcgaacacctatgttttgacgcattggacaaatccgagtgactggtcgtcggtaagcagcgaaagaacggtcgatggatcgagctcgccctgatagagacggatcgttatcgcagttgacggacgctcctgccggcatcgaaaacctcatcaacagcacgcagactctgccagctccgacatctcaagacgcgtcggccgtgtacgccgcttccaccgactctttggtacaattcacctcgaacggagatatttactttttacccagtgcatttgggaacggctggaatgtgcaggttagcgccacttggcagaagtcaagcttctctgtggctggcttgacggggagcaccggtgccgccacgggatcttcggcttctgccagtgccagcgtcagcgtcagttccggtgctagaagcgctactttgacgacctcgggtactgcaactggcgccagccagaccgtaaccgcttcaaccggcgcttcaaacagcggttcgaagatggcatcgccgctcgctcaagctgccgccctcgtctttgtcgtgactgttgttggcgctcatttgtagtctcaaccgtagccgctttcttgtcgtatcagtcgtagctgtagctgctcacatcgtgagatcatgccatcacattcctttcgagaaactgttcttcacggtactttcatgtcgcttatctactgtgttgatttgcacattaatatgtttcgtcgtgcagacgtcgttaaaaaatacatgcgcatcagctacagaggtcagagactcgtaggtattgtggacaggtcgttggtataggtgcgggaaggcataatgattgacttggtcatgaagagctcgtgggcaaagtgatgtgtcgtgtaaatccggcatccggctggagcggactccgtaagatcttgacgataaacagcggctatggatggggtggtcgtgctgtgggcgtgggccgtccactaaaagtcctctctccgagacctggagtacgccatcccgcagagctttcataacgcccttgcatactgtcaacagtggcccgctcgccggatatccctttgacaatgcttcgattgagaccggggtgatcgaaaagatattccacctgttccacaggctcagccatctgcgattctgatacttcaggagcttgcactgccacagtgaaaccgctcgaagtttccagtatgacgtccgcaaccggttcacgagactgcggtgcaacatagtcctcatcggacccaatccaccttgttctgtggataccgtttgcaacgggatccacttgcagtgagtccaatgctttgattaggtctgacgccagagtctgatcattgggtgcatcttccaagatgggctcccaaccttcagggggtgagccaggaggagaaactaggaagttgcgcggatgagcaggaggtgcgaggcgattgggatcagggttctcaggatcgtaagatgaagcgttggcactgtttgcttgtgacaaattggtcaagacggccttggatgtcgatggcagcgggaacagccgcaatgtaaggctaagaacgtctgaatataagcgaagcgagtcgatgtgcgaagcgaccatcgcacttacgtcgaagtgtggctggttattgtcgttcggctcgaatccagcagctcaccgcctgcgacggactcgtgcgttccaattgtcagcgatcctcctccaacttggcgggctagacgtcctgcttcgactctatcccacacgatgatgattctgcctagacctttgacaggcgcccaatgtaagatcgttccaaattttccgtaaaagccatggaggagctccagaatttccgtagaaaacaacgcaggatggggaacaagtagtgcatatgtgttggtaggttcgtgcgagtcctgcttatccaattccggcatggtccgtcaactcggcggcaagtagaggtattcgtcaatgcctgaagatgagcgacaatccccgaatgagacgagtcccggatctccaacgatggtctatcggagtttgtagctttacgatatctccaggcctatgatcctaccagcgatgcacggtcggagtctatataggtagagaccgagatgcgagatgtgactgatcgactgatcagcagctcagcagttcagcagtcagcctcgtctgccactcccgcgcttttccgtatatacgcggcgcgtgtcattccccgctttgacctagcgagctcactcatatggatgatggatatggatgatgcatgaacgattgccgtgctttgtccttcgcaacggtgcaagctatcacaagcggggacgacaataataaaggccgactcgccagtctctaggaatcctaccaagtgtccaaaagactctcatccacggactcgacgtttgacccggattggacggcacgggacgagtctttctatattggaatggcaattcgaatattcggcgaccttctcacttaagtctattgcaaaccgaatccatctccatcatggcagctcggaagttacagagtacgtggttccttcgctcggctgaagagctacatttcaatcacgcccaagcccgaagctccatttgacatgcctaactaatctcaccaaatgtctcagccgagatcgaccggaccttgaaaaaggtgtcggaaggagtcgaactgttcgaatcgatacacgacaaactcatggcatccacaaatgccactcagaaggacaagctggaaaccgatctgaaaacgcaaatcaagaagctacagcgactccgtgatcaaatcaagacatggcttacgagtaacgatgtcaaagacaagacacagctgatggacaaccgaaaattaatagaatctgtgagtgggaagtaccaccgtgcgatagccactatttccctgatcgatgcatctgttcttgctgagctgtagcaaatggaaaggttcaaggcgcttgagaaagagatgaagaccaaggcgttttccaaagaagggcttatagccgcgactcgactagatcctcaagagaaggccaagctggaagctaggcagattgtcgaggaatttgtcgattcactttccaggcagattgaacaggctgaggccgagatagaaatactacaagcaagctctacgggaggtcggggcaagaagagtggcaagggctccagtgccggaaattcggaaggccggatagcggaactcgagcgcctcaatgagcggcgaagttggcatatcggtagactggaggccgtgatgcggctgctagagaacggcaagctctctgtcgagcaggtcaccgaactgaaggaagacgtttcttatttcgtggaaagtaatcaggtgcgcaattacctttagaaaaaaggagcattccttggtgacactcaaggacacgaatcatcattgcaggaggaggacttcgaggaagatgaaggcatttacgaagatcttcacctcgatgaagaagaggatggtctgggcctgttacaggatcacgaagatggtcaaagcgaaagtgatatgcaaagcgtatccgaaggtacgttggtctgcagatgtcgcttgttctgagtcccatgttcatttcagacacccgtcttgcgtcagatatccgcacacccgctaggcctagcgttacaacgcgaacatcggcgagtgcagcggatgaattgagcaatgtgaggctagcattcagactctgcgtttcaatcaacctgataaccgtatatatcccaatatatgctcacatagccaccaagtcccgtggcggctcgtaaaacgccatcccgcagtgagtgccgcatacccgtcgtattgaagctcattccgtcctgagcaccttttctcttcttctgcagaagcgacttccgaaggtaagcctgaatcccttcgttcggtactgcaacttctgaatgtacaacacgctgtgtctcctatgtatcaggaaagacgccaactcgccagacctcaaatccgtccgtccaggctgtcagccccgctccacgtcaaacggtacccccgcctttaccccctatcaagtacgcagctgcagctgcagctgctgtggcccaaggctcgcagtctagtacggtcccccttcaaagcgctgctttggccggatcattggcaacgccgaatgcgattggatacagcgagagcacaacagcagactcgactgccagtgtgacttcgccattggcgaatcataccaaggcgaccgagacagatgacccgtctagactgttcgctgttgcggaaacagaccgctcttccacgctgttgtctgctcgtgaccttatgagagccgagtcgcgtgcttcggagcgtgataacggtgaggcctctgcgacccggatgttcgacatgcttgccttattgaacctcctatctgactgtgatacaatagcctcgccgttcaacgtgagtcgcttactgtggtgttgcgatcttcaagcgacacgccgtgctaaatggctgtgaaataggggatcgcgcaagcttcgggcacttcggctgatttggtggccgggtcaggttcatactttgcgtcaaacgccgaggaagctagcccttcgctctcggtcggccatcgacccgcggggagctctttggtagcgcagccgcctacaacagcccatcagcagcatgctccgcacgctctgtccgacttgatgtcgcatttcgaaagtgttaagcataggtgtaagtcaaacttggctgctgtccaatccttgcgtttttggcatgtcgcccctgactagtggctcattgttattgcactgcacaaacacagcaacggccaggttgacagatgtcaattctctgcacgcggcccttgagaatggcattaactctgcccctgagccacgtgattctgaacggtcagtcttaggggaagtatagcagtcacctgccctcccactcaactgacaattcctacagaccacgatactatcaccctcgtacaccctacgccacccctcagtactatccccagcaacctcacccggcgctggacaacaaggagatatattcccgcatggacctcgatactttgttcttcatcttctactacaggaccaatacatacgagcagtgggtcggattcaatccgggatagaccactgaactaagtttcgctggtgttttctctacaggtggtgtgctgctcgagagctgaagaggcagtcgtggagatatcacaaacagtatctgacttggttccagcggctttctcaacctcaagcgattacggatgagtatgagcaagggatgtatgtctattttgattgggaaaatggctgggccacacggaagaagtccgacttccgattcgagtaagcaggacttctagatgtaggcgatgcggcggactgattgattgtcccgctcagatactattatttgtcggaagattgattactacgttcgcatatggactttgtccagcttatctccttgccagtacattctgtctctgggtcgctcttttgtaattgccatagtcagcaaatgacgtttcattcccattgaaacgtgcggtttgtctcgccgattggtgctagattgcgcgcccgtacccgcggatgtgcgtacaaacacgaacttgcagagttatcgaagtaagtgagataacctccgggatgcggacacctccgatgagctagtcgacgggtatataggtggcgatcggaggtgcggattagacgatcagacaaaagcaatgctacggtactgcgcataagaaagcggatgatcaaggtcgcaactaggctcgtcggcccaccgatgtctagatcgccccgatcccctgctgaagccgctgatcgtctggttatctttcggctagtcctgggctccatcaagcgatatgtgacctcgtgatcacaggcaaatccttcggccgagtcgtgtgaatcatccagggattgcaacacatgtatttgcgcagctgattgtgagtatttttcaagcgcgttcagttcgactccttcactgtgtacaatcgcaccttacatgctgacatctccacgatcctaaccatggaattctattggaaatatgaagaactctatgtgcgccaatatagggagagaccaatactactatacttaggttgtccagcaagcgccccagacccagtaggcagccctataccttctcgtctccatcgcagaattgatgtcgtgagggccaaggctgacggaacgcgcttcaagaacggtaaagttcggacccttagtggttctgttttccacggctctgaggtacacgtagaggacgcaagaacgccgatactcactttctaggcctggtctatgtatatcatgtgttggccaaatgatttaccaagtaagcacacctgtgcggaataatactctgaggatatcaaggcgatctgaattttactttacaaggaacagttatctctgcaacgttggtatactttgcttcactttgattgtgacttgcatgacttgtcgattttacagctagatacatttaaattgtagaaaaggccagcccggcagcgtacagtgttcagtcgatcaggggactcagtcgatcaggggactcagtcgatcaggggactcagtcgatcaggggactcagtcgatcaggtacctggcttaatccctggggacaagattgcgcgcatccacggccgacaactagtgaactgataatcagaacgataagtgatcaggtagtgactaatactcgggagcgctctagagagctagagatctagagtacagagagtcaccaccgattttagtgaggacgtcacaccgccgtagccggggatctcggcgtgacataccacgtgctaccagcgcgattcgtcatcacgtgacgttcaaaagtgaatgcaaatgaattaaatgtagttccgtactcgcgtgcgcgcgagcatctagcgcgagtacagtccaatcaccctggatctcaaactatgatctatgtggtctttatgatcccctcggaagcttgagcagctgagcagaaattcgaatgcgggaatctgcttgatattcaatttgaaacactttgatccttgaagagcatataaggctggcgcctggagaggttttgcccgcttactagttagaaatttgacttgacatacccagatacgaagtgagaaactgagcatgtagattggattagaacaccactaactaatcaactgaagctcaatacctcatcgcttgattgatagcacattatagcagaggaaagttagaagcctcgccacggaacgatcaagtttgctcaactcatatggttgacagctctgtaggtatgtacggtagatcattcgcgtcgtccgatctcgatcgtcctctagacgttatacttttcggccattcgtatcgttaggcgaaccgaaaactacgtcctacccccgacatgtctgctctgaatgatgtgcgtaccgacaaagccaaactctcagagcggctcataggctggccagaggaagatcttggaacgaacgaaagtgggcacgctagcgacgaagccgatgctcgggtccctcaggtgtactacggtgcatggatcgggcaaagattcctcgagggtaaatatgtagtcgtgagaaagttaggctacgggcaacacgccagtgtctggctagccagagatcgctcgtgaatttctaccgctttccgtcgttcccatcggtgagctgtatgtgatgcccttgcaggaagaatcggttcgtagccattaagatcatgaccggggcagcaatcaagcatttttaagccgggaagagtgacgagattggcatcctgaaaagagcctccggcaattctgataaggagaagccatattctcgacacgttgaactctattacgacgacttcgcctacactgggccttcctcttacgttcacaactgcctcattactgagcccttggcgcacagctcactggagtttcaagacgccttgccaaagagggatcgccctctttggctttgcaagcgtttcgctaaacacattttatgcgggttggattatctacacgagggttgaggggtagtccacgctggtgcgcatccgtcccctgtgagacggcttaaggtgttaacatgtcattgctcctttcgaaccgcctgatacatcacagacctcaaacccgataacatccttttccgttcggaggatattgacacggtcatcactcaggcactcgttgaagatccgtcctgctcctatgatcgacctgaaggtcaaccgctgtatgggggaacaatccctttcctctctcagcccttaccaccttggcttgggaagggcaatccgcaaagcattgggacaatgacagctgtcttagctgacttcggtcattgtgcgttggtggtccaaccggatctatcgtcgtgtttctaaggctggtcttgagattacagcgcactggaaagaccagcattttcaagacatcatccagccatttgccctgcgcgctctagaggtgcatatgggatatggatggactacctccgcagatatctggagcttcggttgtctcgtaagcgatcagacgaaccgaaacctagaagaaactttgttcagcttaatcaacgaagctagatctttgaattggctactggcgcctggctattcgaaactggctgctctacttccgagcacaaagagtaaggacacctgttgatgatgactgaggctcttggcgaaccgatccccatggccatgattaagaagagcgaccgcagaacggacttttttcgagccgatggtgggtacagggcggatggacaccgatatgacttcgaccctgatgcgagcttttgtgaaaacaggaaccttcgcgcatggacgcacagatagatatgaggtccctaccctgcctgttaaagagggaattcatttccttgctcctcagatgtcggaagaggagataatcgacttggacactttgattcggaaatgcctggttttgcagcctgaaaacagaccaaccgcttcgcaactgttgaacgacgagtggtttaaggctgcttagcgcgggaccagcgagcgcgcatgtgctcaataaacaattgttggcgtgttgtcttgtattcgtgtagattgactttgacttatcaacaattgtacatgcttggactgatatgttccttagtgttttcgtgcccggcttctcagctattgactgtcacgtagacacgccaacgaagcccgggctcaaactgacccgctttgtctcaattcgtttgtagctactggcaacgcaacaattattggatggtgctgcaactaatgtcttcctgacctgggtccccttgttacaacgggattttgtacatatggtgccatcagtgcaaaggaaggggactacttaggacgtgtttcccagagatccgctgtgatcaatcttttgtaaagttaataaataggggatcttacttgtttgttaacgataagaaatacgactactatgatgcgtcgagaaggtccatgttgaaaccatctcagatatagtcatgagagacatattccagaggtaaggaacaacagtaagatctgggtatataggttgatactgtcacgtgactctagacgcgcgcaccctctagtactaggtacttagaggggtaaaatacttagacatatattcatctctctttcttacatacctattgaacttcatcaatctaattgtatgttgttcaataggtaagttattgaaattgtacaacttaatgatatatcaatctaattgcatgttgttcaatagataccagatgtcaaactaacacgatacaaacgaagacagtacaacatgtagggtgcattgatttgacctcctccctgaggatgcttcaacaaggaactggaatagtgtcctccaaatgagaagtctgtagacgttctaatgggcatgtcagacggtataagtaactatatgcctcatatatgcaagtgcttgaatatattgtccagtacgattccctgaaatgattcccaatatccagtttctagccctataccttggtgcacggcattggagttgcaggacgttctgttgtgacttgttggacagaaattgacgcagtgccaggatgccaagacattggtttaacatggtagatgaatcaggcctaagaaggtcaccatgattgacaccatctgcgcctagcatctgtttgcagaatcttctctggcgtctttagccttccagcccaggttatgcatgatgaatgagcttagtgagcttcaagtatgtgttgtgtgaaccctagtgattagctgtctattgtcagaatcactaaagcttatggcttacctgtgatccttagtgatagtcaagtaacacgcgtattgtgtctctcggacctactactacatcagacgaccagtattgattttatagacctatatctataatgacaccagttgttgctagtgatttgccatggacaacaggtgagcctatacttgtacttctgcgattataaaacagcaatagtgatttgctagtaacaacagcaattagctagggaacacaagtgtaaagtagtctatgggagtacagatgatagaaggtgaatgtctatagagggtaagagagggaggcgacaggcaagtcgtgtctagagtcacaagacatgttaggcatcatggtcacatggggagctgtagccgccttggctagggacatgcccaagaatcaaaatgaaggtatggggtggggtatctccaagatgtgatgccagacaagataagcaatacaatactacataacgagatcctattgtacatatagtaaccaagattgtttaagatcgtgccccaaggaggtactctgagagagcatccgctcgcattgttgaggaatactctagccagctgcatgagatagctatatcagtatcacaagaatgcattccatagattgcaacacatgattgagaatgcccaggaattggtagggagcgtgttgagggtagggttcagtgaagtagattgatatcggattcaggagccaattctgtaagtgtgaacatcgagcgtatggttcctgttgctaccgttcaggtcaataggttgggcctgcgtttacttaatcacaatatattgcagtggacgtcacctcggagtactccctggtggtgtcacgtgatggactctgagggtgatccctcagagaggtccttgtaccaggcccatagcacactaaagaggcatatcccatagtgtagaccaatgcaatagagctagtgctgcatctgttatacaatcctaggtaggagacctacggtgaaaatcccgcatggagtaacaaggagtcagccaaggcctaaccctaacacccctgggcatgggtgctgacacatcacatgatgctcttctgtgcatgtgctgcggtgtacaacctaagcggtaggactcttctaatgcatctcttgcaataagtgggggtatatgtcaagtatggtcactgcgcttcaatcctctagaaacatgagtccattcatattctagccgactcacgcgcctctatataatctgcactatgtattaccgttgcgtgcaactgtgcttgtttgcgccagccaagacctgcctacaatccggtctggtgtcctagtttgggctcagtaccatactgtaccctcacttggtcccttggctgaagtccattcttgccctctaaaagccattctgtgcgtttgaaaagacactatgttctctttagcaatgccttatttgcagcttgagaagcactgaaaatcttatgctcaaacactgtgagatccctcaaaccagactttgatggacatatggagtacaggcctcggttcacatctttacagagtgatatggctgggacatagaaggtaaaacaacgataaatagcttgcaatatctccacaacttgagctaggtcttaatactgatttataatcgaaaatattgacttctgtcgacgttcaggtcctgaggtggtatctgcaaatagttgtgtgggtcgtcgtcctagaccatcacccggactgtcacctcagaccgccatagtgcaatatcacgagatagactttgaggaggagtcccaggagaggtctttggaccagacacatgatatcaatagagaggaacatcctgttgcaaagattgatgtagtagggttgggctgcaaccatcataccattctggattgaaatcttcaggtgccagtccagtgtcaagtaccaagaagttagcgaaggcctgaccccatcacctttgtgaagaaaaattgatggtgcaaagtcaagacaatttcgacttcaagctcttgtatatttcattggagacctgcaaatgaaaactttcgtggcattgactatgctcacacaataccccatcgcgaggtttatttgtctactcttaggattccttgaaggaccttttcaacagtaccagctacatgaaattctgggtagtagtccttgtcactgtatgcgcatattggtaaattatgatagggacagaaagcatctaggggtacaaatcatatttgtaatcaccgacaatagtttaagcaaagcacggtaccatgcaaacttatgttgagggcaaaacagaagagctgcgagtaatctggaggctcatcttgcaaattgtgcttcatattctaccttcttgtttttatcgcagctagcctatgatcgcatgtaagaagcaggctcaaggggtatcaggatgtccagtcttcccctctgaaatctttcaggttatgacacaaaaaatcgggccttatccccactgtcaggccatctggaattgaccacacaatgacggctatcaaaaccttcaacacttagctacaagtgctgtctaccctcctcgaattggagacatgagataatggtaagagacaaagagcctgtgaatacaaatatagaatgtagacgatggtaacgctagggataggatgtatagcagatggacactgtacaaaagcataggtagtggcatcattgaggagcagtctcagacacaagactttcttcttatagaagtatatcatgcatcataaagacaccgagaactttctgtgtgatgtctgggttttacagggccgccgagtctatgaagctaccgcagaaatatgtaaagatgcgactgtgatcactcatttgcgatcacagtcacatcttgcaactcctctcacactactgcgactcagccacagaactgcgactgtggacacacatttgcaactcagtcacatatttgcaactactctagtcacaactcttgtacacacaccactagccctttggtgtatatataggagtccccagaaggaggaaaggcatcccttttctcttctcttatgggaactcagaccccttgacaccagattcaatactcttgccttcatccccttcttcacctttaacgttcgactttcctcaacaaggcttagctacccttgttgcctattcaacaaagacatcaagaaccttagacttagtattgatacaactgcaagacggacatcattagctgtaagagcaccttttctctccctgggatctggtatcgttacaaaatagtattcataatgcaccatacaggcacccagtatcaagtagaattcaaagacaagattgcgcaaagtataggccagagtatggaaagtttcatgcacttgaggaagaacactggattggagtacatcagggcgttacattgaagtagactgccaccgtcagcagagaagactaatcgaaggaaggcctttccaattgattagcattgaagtagtgccgcagggcagtgatacattggcctcagcttcacatgtacactgatgttccatactccatttatgagtttgaagaacgagagcaagacgtaccatacatgtcctcgtgaccatgacaattaccaatcacatggatcaaagaaacattcatgtcaaggctgttgaagattggcatgctatgacatcataggtgatgctcagggtgcaatcttaagcacaaagggttaacatgtgactaggatcacatgtggcaactggagtcgcacatcagtgactcatgtgcaactggagtcacacttatgcgtctgagtcgcaaatccgcaacaagcctagtcgcaagtacactgggaggacactaggaggacatgctcatcagaatagtatatataggagaccatctggaccccatttcctttccctctaccatgtactactttacgtttatgcaagaaacattgatcatcctctcacaacaaggcatcatcagcaccaaccatagcgcctagacccagcaagtaaccaatctttgtggatctagttgttacttcacaacaaaggcaactagtgatacaggcagggcatatgtttacgcagcaagttgcgatgacctttcatgacccggtcatttctctgattatctttgctccgcctttggcgctatttgctggattgcttgctccgcgtttcacatctagtcggttcatgacacccaacacatatgttacctcttcagagttccgcttgtaggttttgctaccaagctccaccaatcacaccatcctactttatttcaaatacctctttaggagataagagaccaaacccaccaataggcttcgtgtccaactttgctccaaaatatcttaactatacagctccagaacacactcctttgtactttctcatagaaatttccctctcaggaaactactatcatatgttacttactgttaagattaggccttggctgactccttgttactccatgcgggatttgcaccgtaggtctcctacctaggattgtataacagatgcagcactagctctattgcattggtctacactatgggatatgcctctttagtgtgctatgggcctggtacaaggacctctctgagggatcaccctcagagtccatcacatgacaccaccagggagtactccgaggtgacgtccactgcaatatattgtgattaagtaaccgcggacacaacccattgacctgaacggtaacaaggggcctcccaggtaaaaatctgttggttgacatcctattgtatgacaatgttgtagatgtcttaagcatttgttgttgctcatacacaataattcctacctttgcctctctccagctcctccgacagaacctttcgatgaaattttccactctgacaaggaggttacgaacaataccaatccaacagctagcaatcgcacaatacagcgcaatactacaggggtcagagtatatgccctaacctgtcattcatagcccagctttaggcttcccccgcttgtcttcacagcaacttcctctcaaggtcatcaaaacctgttggccggaaaaactattacggacagcactgagacccgcttgtgaatcgcttgtaacaacatgcgctcttctttttcacttagtaaatagatgggcttcgttttcagtatgcagttgcaatgcaacaagctttctgatggtacttcactcatactctacacgcaccgcccatctacatatggttcattgctccctcgctcccttactatcactagacatgtttggcgtcatagccatctgcaatgtcatcctgagggctccccatgtgactgcacaggatgaccagccatgcagaactctctcggaattgaagtggatactaatactactaaccacacactccaaaaaccggataaggttttatgtacttcattcataacaaacttatttgaacacatgctacccttgaaagtcctgcagaagagctgtgctgcttgcagcctcatgcctggtttatctttgatgatatcgctactgttgactgcaccattcaacactctggacatctgtcgcaggacttgaccatatcacccaacctttgcacgtatctggcgaattttgtaagtataggaaaggtgcattagcatactacagatacttgccacatttggtcataaggatacacgtttagctcagagcacatactgacggtgggaaaggggaagggtggttgcaagaacgaactaaaaaagcgacaggttcgtcaaacaagtgtaagggaaggatcttactggaatagaatcatagattgagcaaaagatgcagtacacacttgtaagaaatcgtagccttctgactaccacatcacgacatcaactcctgatacaagtccaagaacgctccatgcagcctccaatatcccaagcacagatccacctcggccatacccttgttcatattcatccatgttctcatacatctatcaatacccttcaccatccatccctcaggtcagctcaaccatccttggtggatacaactcaataccatatgatagattggagcaaattgacattctttaatgtttgccgttggattactacaaactcatcatcctcctgttggaccatcttgtacacttgctcaatcaggctcatgtcgatatcaggacttgactcctccattatgacaggttcgaccgttgccatttgcatgaggtcatgagtctgatattgtatgttacctagtctttgttcctgagtccagctcggctttctaacctgaaaatatcattgcagtccaagtgaaacacctgaagtttccactcccaacaaagtcattcagagacctgttgacttcggcttttccactagatgatttccaattcagaaaccgatcaaaaaatatgataacaatatccctgctgaatatgtagcttggggctatcttgggggccctttccaccgatactcgtcacgtgagtgacacttctgtcgacattcgtacatagtagtccagcctgccgctctgtgatgatcatccgcagatgatagcatggagcgaaatacaactgcacttcttggtgacccgcattggcatatcaccatgtgcactggctgagaattgctgtgccgcatgaactggctgacaggaatctgagtctcactgagtatgtggccggccatctagggcttcttttttgaggcatcccatgtgctatgggcgatctgtcatgaagccgatatactacatacttgctaagtctagccctcaaatttgacaggtgattttgagtggtgtgatcagtgtgaagctgcgtaagaacttggggtgactgggcatgtgattctgatcagcctcatggacatatccgcaaatgaaacctttggatcaccttacaggccacagaataaatcgcgtggcagctaagtgaatcctccttggaaggtccttgacccagacacaaagaccgctagagtgtatgcgatagccgtacactggggtagcaggcaagtaacacgtctattaatatttttttagtaggaatctcattcgcaggccccacataaaggactcagtcaaggctaaattccgatgctgcatgacagggcagcatgcagtcagtcactgtgtggcattctgagtgcaattatgtacaaagtgtcacgtgactctagacgcgcgcgccctctagtactaggtacttagaggggtaaaatacttagacatatattcatctctctttcttacatacctattaaacttcatcaatctaattgcatgttgttcaataggtaatttattgaaattgtacaacttaatgatatatcaatctaattgcatgttgtttactacaaagggtcttcaattcttgtttttttagcatcttctgaaaggtgcctgtaccggtgtaagtcatatctcaaatgtgttcaatggttcaatgtgttaattgtgcttcaatcatataacagtacaagcaatttgatactcctgttaattcgtgtgcgtctatagatcttgcagtatgcagcattagcttgcaccgtactgagcggctaaccccaacttggtccgcacatggaaccgcgccactttctgcactgtctcatgtaaggtctggtagtccatattgtgaaattacaactggatccaccaagatgagctgctcaacgcacctgccaccgctccgttcacagccgtcatctgcagacagcaacttgtaacttcaggctggactgcccttttaaagtgtcacaaacgggggccaaatgagactccaagggagaattcctcaatgagttttcctggaaccagcaaacagaatgctagggaatagcttcccatatttgtaagtcaatgtagtaggctggtacctcatttgtcatacgaacctgggtatgaattctaacgtgcaagtcccgcatacaattagagaatatcattgcctttcttacgcatcttcaacaattgttaggctgccagcagcacagtatcttctctgggacttgtaacggtagctcgcgtataaatgagtgcttttacaagtgaagtacataatataaggggtataactagctatgtataaggtagataatattactctaatatacctcttcaagagaggtctctgcagctagtcctatgttacggagtagaccctcatccgcggattcagcgcgcgcgcaaccacacacgtgcggatacaaatatcgacaacgtaaacaatagcatattcgaacgactacctcgatatacaacacctacgatcaaatcacttacacatccgaacatcgactgttgtcagcgattatcgaccggcagtcaccgacaaacctcggatcatctacttacaccggcccgggacataccaccgattatcggccgttatcgtccgacaaacgacggaaaaacacgatccttggcgaatgccgaccacctcctcgtttcatcattcaatatacaaaccttatcaacatacgctcgtacaactcgacaggatacaccctgaaacctcgggacataactcggagacccctgactgcgcacggacacttgctatacgattattctccgctcctttccgattattcgactcgtacgactcattttcactttatacgcttgaccaaacgactatataagtgtcgacgattctcgaccgatccttgtcgagaatacttgtagtagaagagaggttaagcgccaatattgcattcattagtaccgagagttacacctaccgaacacgagtactagtggagaggttatccatctacgggaggctagatcgacgagactacgcttatgacctttgcacccttcgagtattgcttctactcgccccttatcgactccacgtgaccgataagaccctagagcaccccatagaaccatctgcagccacacagatccttcgcgactctgtcctcaacgtttatcgacaaacaacggacgacaaatccctacgatcatcggaacgtcaacgacctacgactccagttatttacatccgcgctcggcatctgcttccgcagtcgagattcgattccgcgtagttcgcccgatcgacccgcccttaacatcctatgcgagtatacatataggcaaccaatacataagcctattgaagatggctataacacaaacctagcctattacatactgtactgggagcctacttgcaaatggcccgtgacactgtcagtattgtgacctaaactctctccatgttattggtagaagaggtgtgatatcggtatttgagtcctctacaccctaaagtatcatgtcaccggaccatttcatacatatcaagtatatcgacggaggggtgcgatatccgcaatcaatgcggcagagaagatacatgtcacccaaacaaacgcgtatcggtcctctaaggtacatattggcacggtgacaaaggcaaagaagaacaaggactgttgttaagcaagacgtggggactagagtacaacaatgtcttattttgtgctagatatatagtgaggcaaacagtttgtagtacatagcaacgcttgaagacttagaggactcaaccgtcgatattatatctctttgacaattacggttataagagttcaggtcacatcaccaacggtcaactacctccaagatctcatacagatcttacagagtcttacagtactttatggcaaccttcccaatatcttccctgcacgcttaaccctcccgtgacatcgctatgtcctacagatttgcacttctagctatatatctatccaacaaggaatatgatctcaatgtactccaattcccaacctttgctcgatgtttcgacttgcttaacaatatcttttgttcttcttttctttgctactatggcaaattgtaacccagagaaccaatatgtgttggccggggcaacatgtctcgtgtaagttgaatcaaaggtcaatgttgagtcgattgttgagatactcgacacactgtacatattagggtggagggttacagtggaaggtaccaccggagcagtgggcgagagaggggcaaaggtaggggtcatcgtatataagtagtaacggatgcctaaggcatccatatcattgtagtacagtagaacgtcaacagaccgacttttacttgtggcatccatccccttagacatctcctccagcgtgttgtagcgtctcacgcgttccgcgtagaacgtctatgaaccgtgtatttgggaccgctcttggagcacctcctcagagcgacctaccagaggagtatcaagaagacctgtttggggaataggtccctatgttgtattgtagtgtttccgcatctgtcatcaatctatctagctataccctatggtcatacctcacctctcgagaaagtctccaaaggctacatccaagacggttccgattcggacctcctcgacgcctaacacagcgcgtcacgtgaggcgcctcctgagggttacacgctgcctacagcctgagcggtaacagtagacacccagtgacaccagtgtgttacattcttgtgttgagacattgtaatcctgcatctgtcatcaatgatatatctagctgtcccctaccatcatgcctcacctcagagaatgtctccaaaggccatctccaagacgcctctgacccggacctcctcggcgcctaacaggttttgactgtttctgtcttattcgttctctggtcttttgccctgggttattcttgagccaaattgggctaagttgacaagtttgtccacactacgatatggtgcgtcatcagatagatcttgacctgactttgcctgtcagccgatccgttcccgttacaagccgttgccccatctcagcgaaaaaggatagccaagtcacatcacttccattcttatctaattcgatctgtgccttgtgcgcatttccttgactaaaggcttgctccgcggaacaaccaagcttacgtgaaaaaggttttggcatcaaaacctcctcgatgtgccgtggcaacgacaagtctagagcgatgcttgctggacgggcttgtcctcgccgtctttcctcacttgcggtgagaaccaaccactcttctccttctcgcgcttgctatccttctctttcttcttcttgttcttcgtttccgcatttaacacgagtctgatcgatagttcactttggtcagcaaaatggctggaaaacatgcgtgggtcgctttacctctcgatctctcgtctctcgtcatcagtctcatcgggcgtggtggctttgaaaattcctcccacagtcagaatggccttcattgtgcaggcaaatatcaatgttagctagcatacgctcaggtccctccttctcggaaggcgcaccttcgcccggttcatcgatgtcgccttggctagaccgggctcattgagaacttgatccaccacgtctccgacgacagagatgacctcccaacgagtgcccttccacgtggtcaatagaagccgactgctcaaatcagctgccatcgcttcgagctcctcttgcgatgcgtcccccttggcctctatcttagccatctcttccatcctaaacacaaagcgcccacaattagtgcgagtctcggattgaacacgacgctatcactaacgccatctgcacaccaactctgcgaatgttgacagatcagtgatgaacataatcgttcacatgcaaacgacacctacgcgctaccgagcaaaccccatccttccttcagcatgctccccttttccttcagtcggcccagaaaccctcctccaaagaattttttgctccgcataaaattcgtcgacttcgtcatgtacacattcccgattgtatgcaggagctccacaccgaaactctcgagcttcaggtcttctgcttcaagccgtgttttcttttcgaatgccacagtctcaacgtccgaagcctccccaggatgtttggcgtcaacgaaagggcgaatatatgtcgtcaactctcgcacaagatctttgatccgagcttctctagctttctccttctcttcttctagtgcagccattttttcccgttgttcaggcgtcatcttgttcttggcggccttcttctctgttttgactttaggttcggtcggttccttctgcactggcgtagagctaccagactgagtaggcgtgactgccgagtgcagtgtcatatgcccagaggcaggctgcttatcgtcactcgtgctgagaagcgggtctgattcgggcgaagttgccatttgctctgaggcaggcggatgaggagcagagcctgaaacttcctcatccatcctcctcttctgtgacaagggatcttctgctgcttgctctgactcctcgaattgctccatcgacgaggcaaagtctacatgttatacgatcagcatggtactgccagaagctgaaaaatcactgacccttgaccagggagatctctccgatcctttgaaaattatgaccaggtttaggcctcaggaaaaaaatatagaagtccattcttctcggaggatctcagcttaccacgacctgaatcgctctcctccgaacagctgcgcaaatagagcgcttggatcctgcatttccatttccccttccgcagtctctgacattttgtttttgccgaccttgtcatagaacgctcgagagttgggatcggagagtatttggtaggcctccctggcattcgagatttcgtctcagcgtcgatgagagcaagacgaacgaatcaaccaggatcttacccgacttccttaaacttgacttctgcatctgggtctctgttcttatccgggtgatactgtgaagtttcgagtcggtgaatcagttgcttagtcttccagcaggcgtgaagaaatcatggggttgggtgttctgacttggattgccattttcctataagccttcttgagctgtatgtccgtagcatccggagccacgccgagggtgtcatagaggacggtatctttcaccatagtggatgcaccgagtatgtaagtagacaacttctttgctgttctgaccctgatgcttggatttctggacggtggcgatcgtctttgacctttaatctataatcatgcatggcaaataggctgatttgctgggtcaccagctcgacggtccgaccggatctataccaagttagctacctgtatttcgatgcgtgaattatcgggggcaattggcaaagctgcgaggtccggatgcagaattcggaagttgcacagactgaaggctgcgttggaaagcagaagttcatgaggagtccgtcagatagctagctttctatggccttacagtgatcagactgtagtgacgcccttgtacgctttggccagtcatctcctagctcgcggagaaagatatgaaacatccagccagtcttcacacataaatacaccatgacagcatgagtccgacggcacagcctctagagaacgtaggcaggacagacacaatcaaggtcaggagcgatcggagttgatgacagcaggtgctggggctacatctctcttgagctcttgcagtgacatatctaagaagaaagcatgagtcagtcctccgagcggtaggccaatcatcccagtaggaaatgggatactgatagatatttggttgatcagcgtggtctgattacgatgttcttggccgtatcggacaaggccaattcagcgaggtgatttgcgtctctcgcgacgaacactcgccattactgaagctgttccggaaggctccgtccacgtaggtagatgcagtcagatataggccaaccggacagatatatgcttgcaaacgcgtaagcaagtcgatggcgaaacgttcgtcgaatgtaagttccataccaagattacgatcacaacgagcacgcccacaatccttctgatttgcttgaatgtaggtgttggatctctggaaggagcgagacatattggcgctgcctcgcactggacaagaacattatgcaagcctcacgccgagactgtttcatgctttccaaacggatacgcagctcgtcatggttcaaacatactacgcatgtgggtctctctgggacgtgatgagcgaccgtgagagatccagtagtctttcccccgagacgaagacctggaaggtggacctcaactcgggcactccccctcgcgagttcttttcagtgcaagagatacgtcattacgcagctcagatcgccttagccatcgggtttttacatgacaacaacgtagtccacagagacgtcaagcctcacaatgtcctcatcggtctgagagcccaggcggttttatcagattttggtagcgctgcttcccttgaggagatgcgatcagaaatgcctgtctccaaaccaaagttgtgcgtgcctcacaaatatacgaccttacactccaacatcatgcgtcaagggggaataggaggaatacgggatctggatgacgttttgtggccgtctcccaaatacctgacagcttcggcttgctcgtcgctgcatggcacgttggactacatcgcgccagaaggtgagcagcgctgcacgtactctcgaacgctcgctgattgggtctcttgaacggactcagtactcgtagcaagtgaattgtccgcggcattggtcgtaaataacagcagcgacttggctcgaaggcggcatgtagaggctgaaacgggagcagtgcactttgggtatgatcattcagtagattggtggtcttggggagctatgctattcgagatggctttcggaaagccccctttttttgagaaagagatttcggagacttacaaacgaatcgctaatctcgacgtgagtgaaatcgacggtacaaaaatcgggcggagaagcgggaattaagaactcagtcatctctgtgtcagcagaccatacacttcccttgctttacctcgggcgatcgtcactcgagtctggtagagttgcttagaaggcaagcatctcctgagaccgttcaccttatcttcccccgcaactgagtatacgaagctcccatccgcagtgtcttaagcgtggctggtcataggctcggcagaaggggtcctattgaggtattatctcatcccttctttgcgaccttggactggcagcggggcatcttaggtatggtagcgtcgttcagtgtcatgtgcaaaaatcgttcttatctctttcgaccccatagggcgtttatctccggagtttccccctccgccgcccatcgatgtcgaagatctttacgattcttttcttgaggttgggacttggtcgatctcttccgacgaaaatacacttaaggcatcaagatcgtccaccacagaaccgaatccaaactggcaaggttggaatcgatacgagggagggagctcagccgatatcatgttcggtagcatggatctgcacaccaccgagacgtctgcacgctcacgctgcgtggaactctgctcatatgaaactccgttgcgaacccgccctgctcgaggctgcgcgactccatatcctcctggcactattttacgaaaagcttggcaagcaccaacgacagcgcggaaattgcctgaacaagctgtctttgatagcatgatggcttgtgtccaggcttcttcgcgcaaacgactactcaacttgggtaccggtgtcaagccagtcaaaccacaaactggccgacaggaggatatctcggatcgtgaccagagatatccgagcgtgaggattgtcgagggaccaacgcaacagacacgcacaagtgttcaagacatccttgcacggtctgctgctttgggtgctgatttactcgtgagcagaattttacaatctcttgagacagctatggataagtatcgcacactgacattaaaccgcaggtgatcgatgacacaatctcgagacttgccgtcagaatacgcaataataccgctgaagattagtcaatcatgcttcacctggacacaaagatatacaacccaacgttcatttcaggcaggtagtcaacaatatttggtcctcgtcgtctgtactttcgcccagcctgtttcttcatgtgtcatatcgcgatcgtaaaagagggtattcggcggtctcggcgcagtactcctatgcgactctgctgttctaggcaggtacgctcgaagaacggagcttcgggtaactgtgacaacaacgtattttagacaaattgcatttctgtatgcgttcaccggacgagttgtcataccattcagatccgtcgcatgagtcagagtggtgaaaggccatctgaccgacttttgccacgaccagtgcggcgaaggcccctctcgaagccagtcaaaatcattgacctgatagtcagcatcagactgagaggactccgcactgatcatcagtgaggtcgaatcgctccgcatcgctacagggagactgaccgtctgatcttcggaggccttcaattcgtcgggatatacgccgaacttgatgtccctgcttttctcaatcgctggtgtcgaatgggcagcgagaagtacagtgcagcgaacggaatcatgcaatcggaactggcgacatgaggatgtcaacatctgcgagttttagttctcagctgtgtagcgtgcatacctgttgcgctcccaataccaccaaacagtcttcgagtttatgcaaaagtacactgcctgtgatggagtgcccgataacaatgatcgtgttcttgactttgctcatgtacaatgccgtacaacgacgctgtctgctcgcgcttcgccctgaaagagcgggcaagatcgccgtgtcgcaaaggtcgataatgcagccctcaacattgtccatcgtaagggaaaaatagtcagaggatggatctgaatagagttcaaggtttgctagcgtgatgtattcgtcgcgtttgtcttccaatcggtggacgcatgcagctgaagtctttgcacttccatctcgctcaattccagcattgttagattttggaaggagtggcgagggtttctccgtgttgtccatgtcactgatatgacgggcgggtgtagctttcttaaaattgaatggcttacgtggctgcttcttagggcgcaacatcaaatctagctcttcgatttgctgcgagatcgtttcgatcactatattgatcaggtcttccagtgcgaggatagataatctatgcgtacctcttgataccggctctgatcgtatcgaggtagatagtcgttagctttgttgagttcggtccgcatccagcttagtttctctgcagctgcgtggcgatcggtagacgtcgagcgaccagctttgatcatgtcctgcagatcttgttgttgtaggtccaaaggctgtttatcagtatagctgagaaacctatcggataggttttgggaagctcaccagtcttggcagtggtgaattggcgatgaaaatcagacacagccgggtcttcttgtctcgcatcaccctccgtctgaagctccgctactgggctggcctgcagtatcacgggtcctgaagcggcatctaggccccggtcttcagaggagtttcccactctcagcgatgtcggcgttgagacgatagcacgttcttcgctttggctagcccgaccagattcggatgacgcaagctccattccttctggcatcgagtcaccgcattgcatgttcggcagagggatgtcacttggcttgacttcggtattaaggggtacagcatgcggctggagtgggatagtgccgtaatcttggcttctcaactgaaggcccgtgttcgatgcgacattcatcgttgtgcagggacacacgcggccaaattcaggaagaggcacagtttccacagataagccagacgtcgagaaactagtcgtgtgcgagggattcgcgtagtttccaagctgccccgattgtgccaagatggaatggctcagcttgggagatcgatcagggtttgaagccattgtccggcaagcgcttgcggacggtcttttgacctcgtctgatctacctgtgtcatcctggacctttctctgcctctcgctggcttgcgatttggcaacgggtatgccttcggatccaccgacagtcctcgaatctcgttcgtccgtatcggatctttgtagcaatgtgcccatcgcgggagccttgatgccaccgtctctcctcgcctcatctgaaatttcctgattccctacctgttgcaggacctgcttgtcattgccctgatccgacgaattcggcgcggcaccatgcttttgtgattcggatagctctccgtcagagagcggaagaggttcctttcctggtgtagtcagtccgtcaggtttggtaagagccgggatcctgttcccgtaaagacctcgattttcgaccttcttccgtgacccggcaatcacgtctggggcgatattcttggcattgtagctggggattcggttgccgatcagtcctctatcctgcagctgactcgagtctgacttgatgggtgcgccgtatccaaaagcagactgtggcacaagaggcgttgagtcggggttgttaaatttggcgatccgatctcttagcgatccaaccctcgtctgctggctgctggacatgcgcacgacctggtgggtttgaaacaaccttctcctgtgttattagagcagcgtgcgttatctgtttagcagcggtacagccggatactccaacaacaatccatgtgacacttgaacattcagctgaatgccagtcgacatctttgtcccgatggcggccgatacgtacgcaccagcccatgatgggatgatgacgcgagtgcgaacgctgctgtcgcaaccggtaaaacaaagctgcagccgacgatagtcatgtagccaattggtcaactggagatgcagtagatagtacacaacacatgcaatacaacgggttcgagttacaggatgtcaagccgcatggcgtgccagcgatgatcccgtggatgctctatacaccactggtgaggttggcggggaaaccgctgaagtcaacttgttcttgtatgagctcagaaccgcgctggaagctgattctcagcctcaacctaatttgcgcgcccggaggggcgatgatacgcatctgctgcgattccgttgccccaggagacacattcccattgctcattgccagcatttgtagttgttgcgtctgaccaaacagctcctcattagcacatcttgttcgtcagtcgcagcaacacggagactcaccttcggtaccgctgcctggaagttgacattctccaagacgcccgctccaaccgcgttgaagcgaacaaggatctgaaccatgcctggctgcgctgagttggtcttgggcataagtgtgatcttcaggtcattcttctcgtaagcagtgtactgctggagagcagactttggcaggccggcctgctttgtgttgttttgatagagcactgattgtacgctgtccggtttgggcgtcgcgattgtgggttcttcgtgagtcggtgaagccagggagtcgaccgctctaggagacgactctttgctcgtcgattgaccaatgttggacgtgccgaacaggctcattatatcgtcaaccggattgacgttcttgattggtcggctttccgaagctgatttgatcgatcctccgaatatgtctgccaaaagatcatgcgcatccacgttcgatcctgttccagcggcaattccctgatcgctctcggcatcgcccataagatccaccaaggaatcggtgtctgtgcgcgtcgagccgacattgcgcttctcagaaactgtcgattgtgccagtgcttcagtaacaagccggccaattcaacaggcagaaacgatgccgtacctgtgcccatgattgtagctctgatttctggagcaggcatatgttccagaacgccgttcacgaggtctcccttggtaaacaaggcctcgtattcgactgaacgctgttgaagttccaagtcctgactttctgcatacctgcccagaatatctcgaatcttctctacccgcttcatcgtgtctggaactgaggcctcattcaggcgaatggcaaacttggacagggccgtgagcgtatactgccggatcaatgtgtttgcgtagggagacttgatgaccatctctagcaggtcgaggatttctgcgtcagagatctgagaagaacgtatttcagaaagagggacaagtgagccattaagcagaaacgtacatgttctgcgccatcgctggcttgaccgttagcgtgagaccgcaggaccgaatcaccgaattcgccaagaatccagaccgcgaccaaagtgagagactcttggctcacatctgcctgcagcgctcggaagagtctgctgacagtgtacgcttgcagttctactgtgtggcagacgaggcggatgaatgaagacatcacctcgtcccgaacgtgattcccagcctaaggagcaaggccagcagctgtagtctcagcttgatgctgctcggattgtctctgccggcaacaagtcgcgttgcactcaccacctggaggaccctgagcattgtatcaatgtgccatcgtttatcggaggcgaaacgctcggcagccaggcagatttgtgtcgtcaatccgagcttgaattcgttgtcggcaacctcaaggaagctgagcagttccctcatcaatgatttgacattctgctcgttgattagagcgtaggaaagctccaaggcccttctccggatagatacatcgccatcactcaaacaagagaggacaacgtcgcgatgcctttgcactgcgttttctgtgaccgcgacctgattcagcgtgtttagggcgacatatctagaataagaccaatatcgactttgttcagcgcgagcaaggaaacactacactgaactgaatgctgaccggatgttgttgtccctattgcccagaaatttgcccaagatattgattgccatcacgcggagcccgctgtccgcttcaatttcgaggatagtaagaacagtctcgtataagatagcgttgcccacgttcttgctagaatcggtatttgtagcaacctgacatagaggaggtcaagtattcaagtagtgaataaagtggtgtcgcggcatagctcacctgagcgagaatatcgttcatagcttcactcgcttcggcgttcccgttaccgagcacccgaagtagcctcaaaatcttgacctgtaagaaagggtcggtgattccattcacatcatgttctgggctgtatccggtcgtcacgagggcttttaggtgtttcaccaagagcggtacagcctgcagatccatgtcagccatcttgccagaacgaaagtttcaaccaatttcacctttctgaatgcgtcacagacaccttgatctaacctggacatttccgtcaccagcgtaactccagccaacaagactccatggttccggtcatgcagaagtccctttgctttgtcgagaaagtgatcaacgagttccggaaccttgcggatgactctcagtgcgcagagcgcagactagaaggcactattctcagcatcgctccacgattgtaattgccagtcccacggtacctttttccggatgtacgtgttgctactgccgagcagtttctcaatctcgttacatagatcccgcgacatttcctcagacgaaatgtttgcgaaggtgcacaaagcgagcccaacggcatacatgttggagtggttcatatcactgtcgatgacggttcagcttatgtctcgcacttaagctatcatgataagggtactgacttcttcagcgagttcgtgacaagcgtaagaacctcctggttttcgtcgagcagtagcatgataccaagatatcccagtcgcttgtcactaaagcgcgggctggcaacgagcttaaggcattcaatctggccgaaatgagccggataaccgagcatgtggatgtacagcaacttcgctatgttgttgtgacgggaaaaggaatcttcctccttgaaagcagtccggatggctgcggactccttttgtatgagggctcgctcatcagccaacgtctagcggaaatcatatcgagtagtgtggcctttcgtcaacgacatatggaaattagaaagtattcctcaatgcacgcatcactgaccttgcaagaccgaatggccttgatgagggctattttgggctgagtcaatacttctcgacgctgactgtatgtggcaggggagctcacctttcagattgtaatatccgggcatgactacactgaaaagctctgtcggaactcggggcaagattggtactgggtgtttcggtataataaagagagaagctagatgcgcatgcccgattctcctgctgttgtggacaatatgacgctcgtcggtcaagctccgctatcgaggctggatcgttggaccaagctagcttcttctggcggttggcagcaatactgcctgcgtgaagacggtacgtgctgatgtataacctagagagacacggccggatgggctctagctttacaagatatcacgccctgacgcgaatgccatatgaagcgtgtacttattgacaagatgggagatgatggtgggggggggagacacgctcactaaggtcgacctgagacttcacgcgcgcggcgacacccacagaggggaatacgttcgaggttatcgacaggcccagatatgcagctgagcagagctgagctgagctgagcagagcagagcagagcagctggattgagaaatgttgtcatcttcatattatgtgttacaagatatcacggcctgtcatggtgttattgatgcatgtcttctctaagcttctagttcttcttgtctccttcggtggtagactctcccgaggcaggctcagagtcagcgttgccagcagcggcccgctgctcgtagaccttcttgaagaggccaagagaggcttgttgagtctgacgacgtggccgcggagattaagtcagtttcccgtatattctgatctcgcggggcgaactcgatccgctcacctcatcgtacttctccttcaaagcctccggggtgatatcatcgcccctcagaccggcagcagccatctcacggagctctgcaaccaatttcttcacggtctccttctcggtcgcatccaattgcgcctcgaactcctgcaggttcttctcgatctcctgggtgaagccttcggccttgttggactgctcgatgacagcttgcttggccttgtcggcctcggcgaacttttcactctcctgaaccattcgctcaatctcggagtcagaaagaccagagctcgaggtgatagtcatggtctgctccttgttcgtggccttgtcgacagccgagacgttaacgataccgtcagcgtctgtaaggtatagtcagtctaagaaggtcctgtatgaggtttgtgttctcattaggtacataccaatgtcgaaggtaatcgcaatctgagtcgtaacaagagcgcatgttcgatcagttcgctgccttgcacaaatcacgtagctggctttgtccagctcacctgaggcacacccctggcgacgggaggtagtccgctcaaaacaaagttacccaggagctgttcagaaaggaaaataagtcaatcaaatcacgaccaagcgaatgaaagcgctgcgacgaaccttgttatccctgaccagcgctcgttcaccctggtagaccttgacatcgatggcactttgaccgtcagcagcggtagagaaagtctgactcttcttggtaggaatggtagtgttcctgttgatcaacctggtgaagactcctccaagggtctcgattccaagagaaagaggggtaacgtctattcatgaactccttcagccttcaacacgatcttgcatcaacgagaagagcgcttctacgtaccgagaagcagaatgtcctgaacggatccgctcaatacaccggcctggatagaggctccgatggcgacagcctcgtcagggttaacacccttgctagggtcccgtccgaacaagcctttgacagtctcgatgaccttgggcattcgactcattcccccaaccagaatgacatcgttgatttcgttgggcttgacaccggcatcggcaagggccttcttgcaggggtcgacggtcctgtcaaccaagggcttgacaagtgcctcgaacttggctcgagaaaaggtagtgttgatgtgcttgggtccgtcagcagtggcagtgatgtaaggaagggagatgtcggtctgggacgtagatgaaagttcgatcttagcgcgctcggcagcctctcggattcgctgaatggccatcctgtccttcgagaggtcaattccctcggccttcttgaactcgctgacgaggtggttcgcaagcgtgatgtcgaagtcttctcctccgaggtgtgtgtcaccgttggtcgacttgacctcgaagactcccttttgcatttccaagatggacacgtcgaacgttccaccgcccaaatcgtaaacggcaatgatcgaactgtcagatttgtcaagaccgtatgcgagcgccgcagcagtgggctcgttgatcactcgcagcacctcgagacccgcgatggcaccggcatccttggttgcctgtcgctgagagtcgttgaagtaggcgggcacggtaatgactgaggtgcaacgcggacgtgatcaaatcagtacatacgtttgcgcgacaatatgcgagtcgcgaaagagagaaggtggggggggggggggggccggcactcaccggcatggttgacgggcttgccgaggtaggcagcggcggtctccctcatctttccgacgacgaaagctccgatctgggctggcgagtaatctttgccttgagcccggacccatgcgtcgccattcgagtgagaaacaatcttgaaaggcacattgtcgagatccttctgtacttcagcgtccttaaacttgcgaccgataagtctgtggacaagaagagtttctttgatcaaggccatatcgactgtcgatagcccgcggcgacttacctcttggtagcaaagagggtgttctcggggttgacaacggcttgacgcttggccggctgtccgacaagacgttcgccatctttggtaaaggcgactacggagggggtcgtacgaccaccctctgcattctcgatgactcggggagtctgtccctccatgatggagacacatgagctgtagggtcaagaacgaaccgaaattaaggatggctggatctgtcctatcgaaacggtgaggcttacaaggtagtaccgagatcgataccgatgatagtctcgggtttggagctggcgtatcgggtgtgcatcgagggcatcatcctctgcagagtcgattcggatcgaaaagtaagtcttgtggtcgtaaacatttcgggagtcaggcgaatccgggggactcacggtggcgttgcgcataggcaaagccttggaagcacgaagagtccgagcgacagagaacatggcggatcgagcttggtctatgaatgtggcgagtagcctagaatggaagtttgggcttgacgtgagccttttgggtgtggtgattcgaagattggctcttttgatagagtttgaatcgagagtgtcttgacaaggtatggaatcgacttgccacttgaattagaaagtgaatagcagaggaaggaagtcgtggtgattttagatcgtcgtcgtcgtcgacggcgcgaggggcggaacgacgctcgagcaaaaagacgatcgcgcaggagagaaaagactagagccatcgatccgatccgtgcggtgagtctatggtctaatcggatcatcccctttctcgggccggaagatctcggatggaaacgcctggaagcgcgatgatgaaccgtatgatgatgacgttagcgtttaccgatgctagccatgctacgtagcttcagtagctcgataggttcgccccggtcacatagtcacaggagagtagttagctgtctttggacgcccccttgatcgcattcgtaggatctaaagtactagagtatagcttccttcgaactatacaaaaatcgcattccggccgggcagaccgttcacatcagacgtaaacacactcccgcgactcaaggattctcaaaagcttggctctacttcgatcattcgggcctcgccgaagactcggaaacatacagcagttatacgagaaagcaaaaggacgccaacttatccagcatgtcatctggttccgaagcgtatcagctttcggctgttatccaaggtcacacggctgatgtcagtacaaggtcgagctggaatttcgtcctcgtagctccgccttacctctcgaagtttcgatctccaggtgagggctttatcagtcctctcagatacccagatattatcggcttcaagggatgcttccgcaaaacgatgggaaaagatgcagggcagcaatgattggcaagagagtgaacattacgcagacggtcagggcaaatttatcagtgcggtgtccgcggtcaactacgacggccaaagtgagatcagtcaagtttgacttgcgccgaagtaacgtactgaaatccccctctccccggctttgaaatcaagcatattatgcacttggttcggctgcgggcaaaatatcgctgcacgcggctaacagcggtaacagagcgttagacgatctagtcggccacacgaagaacgtttgtgcactagatcgaggtgtcgacgcggaaggtcgtaatgtcctgataagcggtagctgggatcagtacgtacggtctggagctacgccaagcagtgcgtctgtgaccgactttccgccttttcaatcgatcaaatcaggtctgcgatcgtctggaaagcgttaaagcccgctttccgcatcacttcgcatctgcaagctgtttgggatgtcaagtgtgtcggtaacgatagatatctcactgcatctgcggacaaaatcatccaattgcactccgatactggcgagctgctccagacctacgccggtcacaccgactgcgtaagaagtctcgctttgacaacagatggaaaggggttttggagcgccgggaacgacgggttagtgcaaggttcgagggtctgccgttcgatctcaactgatgtaccctgttttagaaacgtgatcttttggtcgttcgattctccaaacccaattcaaacttatcaaggtcacacgtcctttgtatacagcgttgtcgcgctgcctgacggcactggttgcgtgaccggtggagaagatggtactgccagaatctggcaaagtcagtgaagtctagtcctttccggattcgtgggctgacatctgcacatctagatcatcaattgatacagagtatcgctcacccaaccatttcggtttgggctgtcgatgtgctacctaacggcgatatagtgtcgggcgcgtctgacgcgacaatccgagtgtggtcaaaagcgacagaacggcgagcgagccttgaacaacgtgaaaagctggagcgtgatctacgaactcgcgccttgaataagagccaagtcggagatgtaaatatgactgacttgcctggccgcgaagctctcggccgtcctggtaagcactggccgttatcgttgatggagcacgttcagctcagccgcgcgccttacaggaagaagcgagggacaagtcatcatgatcaaaagcggagacaaagtcgaagcctatcagtggtcgtccgcgtcgacaacatggcaacaaatcggtgaggtcacggatgctatagggaccggaagaaagcagctctatcagggagtagagtacgattacgtctttgatgtcgatatcgccgagaatatgccagctctgaagttgccttacaacgtcaccggtaagccttaagcagcactgacagaggctacgcaatcattcaaggcttgtctcggctttagacaatatgtacactgtcgcggagaaattcctcttgagaaatgatcttccgacttcatacacggatcaaatcgtcaagttcttggaaaccaatacgcagggcgcgactattggcactgggtcctcctctgaccctttcacggggagttctagttacaaagccttgggcaacgaagcagggtcaagctcaaaccaataccgggatcccttcaccggaggtggcgcatacacggccggtccagccaaccatgatattacggcgaccgaaacgcagtctgcgaacgattcggtaaacccgtcttctgcgagctccacgaagtctttccagcctatcaggagtcctcaatactttgccgccatcaatatcgaaccgatcaagcggaaaatatctgagcttttgccacaattgcccacacaaagcgagtccgatatacgacttgctcaaatttgcgatcggctcggttcgactcgcacgcccggaaatgatgtcccggtatctcagaccgacgtcgcttatctaatgcaggtcgcgcacgattggccggcagataaacgatttcctggttagtctttccataactactacgaattgaacgagctaaaaatcatgttcccatagttctcgatatcattcgatatttgtgcgcgtcaacctctactatggccgaatatacgacgggtcatgaagtgtccatcattgacttactgctcgactgctgcgactgggccgctgcgtggcaggccagccgaacaagagaaaccaacactatgttggtcatgagagctgtcgcaaatctgtcggctacgctctcaggcagacgagtcatggcggaagttcgcacgcaagaagtgagtaggcttcccgcgtgtacgatgaaatcgggaattgacattcgatccgccgattcattagcttcttgggtatcttgcgagccagcactccttcgagacgctgaataagaatactcggatcgccatggcaactatcgctcttaagtaagtgaaaagcggtgtactccctcacgatagtcgttctgacgttttcttgccacgtagtctgtcggtcttagcgctggagggatcattgccacgggaacacggtcctgccatcttgcagttcatactcaacgtaagggattcctgttgaatgttcaacttgtctcgatttcttacttttcagggtcctcccaacgactctcttagatcatgtccaacgagactgaagacggcgaggtgtcttatcgtgctatgatagcgtttggaaatgtcgtaagttcaacgtggatccgttttacaagcggcgcgttctgacggaaagcgcttcgtgatcagttgagcgttggggaactgtgcggtgcgatctctgtcggcgacatccagattgcgaaggaactatcaaacgccctggcattgaagttgggcgaaccacgactgcaagaagccgcgaaggcgattgcgttgctatgagaccatccatgaagtgatgaagaccgaatcatgaggccgagactcttgtgtattggaatagtacttttacacccaaatcagcatggtatctatgcggccccttctgaaaccctgttcggcagcgcctggccttctagagggacatctagactacttctgccaacaaaatgtggagatcgcgctgcccgcgccatgctccgcggaccagccggccgagactggttatgtgacgaatcttgactcaatcgcgattgagctcgctcaaggcctccaacaggcgagcccgcccggttttgaggatctaaagagcgcctgcgcgaatctttatcctttttggttccgctccgaaaggcattaaagattccacctttttgcgcggtcgacttggacggcggtgaactaggaatttgcagagaatcaggatcggagcctttagtggccaatgaggggtagggcaaatcgctgggcaggggctcaatgggcccagagataagatccgtttgagcaatctccttggctctatatgcagtcgggtccacctgcgaggtggacccaccggtccgcatcggaaattgagatgcgccggaaacgtttctgtccttggctggaatgtgagcaccagtaaccgcggggcggcggaaagtcgagtctaacgaagaatggttcgacgtcggatcaggggaagacgcctcccgacgaccttgaatggtagggatacctgcagatgtcggttcgaccgatgtgaccgctgaatttcagggcgcgcagcaaagagccgtctcaattgcgatacgtggcgatatcacggcatgagcttacgatgagcagtctggttagatgtttgcgtgaaagctagcatccaggttccgaggccgctttccgtatcaagcagttcacgggtagccctgccgtaagctagtgcacgatcgcctgccctgtctagcacgttcaattggctaagaaccatgaccgctggccatctgactgctgaagggctagcaaacgaatggctccctacgaacgtcgtttgagatatggatgcccgaaatgttgaagtggccgtttgcgacgaattcgaccttagcgatcgtaaagaagaggggcgtcggagaagcgaaagagatgaccgaggggcactgctgtttgacgtggttctctctgatacgttttgagccatcaaggagggcaagtactgatgcaacgcaagcgatgtaggggtgtcgtactggttggcatcgagatctctctggttcgcgatgcaggtctccagcttgctataaattcgggttccgacctccgttctagagcgggtagcggactagatttgtcgcaaagcccgtcgtagtcttgctattgactggcgtggaggggaaatacgggtcgactgaccgactttaatgatcttatgaattgatgagacgtccgctatctcgaccatcatatatgtaacgctctcggatgcatgcatggatgggatggatgggaacaaaacaaagtctcgcggggcagagacgagagagagagagagatgagcgagagcgatctaaagggggaaaagccagacgagagcgagcgagcgagcttggaggccccgcgctcgaaagcctgatcgggaccatcatgttccgttcgtttacatcctcgtccattcccttcgtctgatctcgattccactactgttacaattattattgatcaatcccaccgactgtgatcttcctcatcgtccggctcattctttcaactgaacccgggctcagtcgaacacaatctttcgtctcagcagagttaccgtaattcacgtcggtcgttcccctttctggtggaaactaatcccatcagaatcggaaagtcgaggttcgtcgggaatttgcgtcacctgcttcggtcccgttctaaatctgaacctgttcaagacagactaagtagagtactagtgaaggctggtggagacattaggaggcactgcgaaacatggggggacagctcagcaaagcgatgggtaagataccctgagcgtggctttgaagtttctcagccgcttcgctgatcaagactccctaccgaatgccttccgatcgcaactatctttcgtgtatgaaggacgtctgttcgggaacaaggaaatgaggatattgatgttgggtttggatgcagccggaaagacgagttagtgttggatacggctgctaactttacatctcggactctgcctgatcgttccgctgatttctctgccagccatcctttacaagctcaaactcaaccagagtgttactacgattcctacggttggattcaatgttgagaccgtgacatacaagaacgtcaaatttaacgtgtgggatgtcggcggccaagacaagatcaggcctttgtggagacactactacactggaacgcaagtaggtgttgacacgcgatccctcaaagcccgtttcctagactgatacctcttggtttccctatccgctccgctagggtttgatattcgttatcgattcgcaagatcgggatcgtatagatgaagcacggcaagagctcgacagaattctggcggatcgggagatgcgggattgtttgctcatggttttcgcgaacaagcaagaccttgacggtggtcagtccccgaaattggctttgtacaaaacaatcagtctgatgccccatttgggtacagtgatgtcgccggcggaggtcaccgaaaaacttggcctgcatcggatgaaggacaggtcctggtatgtccatcccaggtaagatcgaccttgtgcaagtaacagcctcccttcggcgccaatctaactgacctctatgatatagttgcgccaccactggcgagggtctcttcgagggactccagtggctcagtcagaatgtccgagggacaaaatgaggttggcacgatcttcgctcgagacccagtttggcacaaatttttcgctataccccttcgaggctcatggtatggggattcgacaccggcctttacgaacctatttcttccggtctcggagctcttcggtctaccgaaatggagtgtttggatatattcacccgtatgcttttgacaatatatataatcgtttgcgaatatcatcagcgagtactacacaatctcatgggaagccagtgacgacaaccctcgcaggtggtatgtgccggagcccagaccctgctgttagatgtgatcgagctgtgactagccgaggtcggtcctgcatacttttggaacctgacgttcgtgcatctgctccgaagggcaatgtttcacctacttgtgaatttgtatagaccaactggtcatttgtcgggttgcttcgatccagatctcggaattgcgcaaggatgtctgccgtcaattggagatcgaacatatccagcacgaatgctcggaccggttgcttgtaatgctcgaagtagagcatacggaacacggtgaagtagagctgcaccgagctgaacaactcgcggtgacggttccgtaagcttaagacgcgacgagtttcagcggcttccgaatgggtagggttggatgctagtctcaccgtgctagattttgcatagcttgagtcgctaagacataattaccaaggttggaaacgtcttgtagcaatctggcttcaagggtcgagaagccacatcgctcgacaagatgacttgagctttcgggcggagaggggtcctccaactgcagcaacaagacttgattgtaagacaagtgtcacttcggtcacgcaaacggagtctcacattcatgaagtcgatcagatcctctgggagacacaggccagtgacttcacctcttgaagtcacactcggtatccacccgtactcttccagaatatcgcagccggccgtggttgacgctatcaaacccagcacaaaaaaacatgtgctgcgtgcgaggtttgcgttaattgtcagagtttctgacgcttcggcgatggtgacgtctcaccctcgtagacttaaaataggtgaatgctccgcaagttcaacaatgagctctacgatgtcttcctcttcgaggaaaggcaatccgccttctgtggacccgatatttccctgaagccgtccgtctcagtgttccggcatcggcacgtagctagcatcgtacataccagagcccagagggcgctcttcaaagcgattagaaccgattcgttcctgcgttcctctccatgatggcgcagcgtatgcgcaaagcgcgaaacgtgtcctttcgcgctgagtactcggcatccttcaacggttttggtaatctccccataaaagttcggaggagctgatatcaggacagggattctgtcctcgccagcgattctatcttcaggattgtaacctctttacaggcgtagccgtactcacaaccgcgcggatctgtcttgagcgggagctgttttgatcccctcggtcagatacaattcgatctgcgacacatactgcatgttgcggcactgacgtcgaagtgatgtgatctggtcaactgtcggcgccggtagcaaagatcgtgacgctttctcacatgataccactcgtcgatttccctgtcgatataatctgcgcgccgaagatacgagaagccagcggacgtcgataggaatctacatgccgaagcaccatttagtactatgcaatcatccttagatagcggaactcacttcataagcagacactgcccgacatcgccgagatggtccaacgtcggccgcagtcgcacgactgcttcgaggatgttcacgtcttcgcagacagtctcgagatattgagcggctgcctcgcagacttcaaaagccgggtcatacagctgcgtaaccagcagaggcaaagcccatgttgccgaccggtcatcttccaacaatcgaccgaggcgttgcgtagcaaaaatacgtgtatgctgacagatcgaatgtctgcgttcagcgatactgagtctagtgtaatctgcaggagatttaccatatagcttgaagtcagggccttcgagagtatgattcgagcatgaccgtcactgatcaagtcgagaagatcagctgtcatcccttctttagattgctcaacatcctaaccttgaatagtctaaatttttgatgatagcccgaatcaagtcgtcccggcttcgcaattcgcttaaatggtaaaaacaggtgaagaaattgaacctctccaataacctggaggataatattcagaactggatacgatgccggcatactgcgtcttttccttgagctcttacttgagaccttcagcccttgcactgaggacatgtatcatctcgaagtagccgtgcgatagggtgttttccattctgctcctggagaagtatggctggggattgggatgaccggcgtactgaaatgccatgttataaaatgttgtggacgcgctcagctccactgcggtactgacttgatctaactccatgaagcagtctacgatctgtctcagaagttggtcttcggccaaaatctgcaggccgtcctgagttgacataagcgaggtgaccagagtagtgccaagcttaatccattttctattagcctgtcgactcgggtagtcagtattggagcgcaaagtgcaaatctgatgggctgtcttttacaaacccttgtccttttagtatcgctgaatcgccggtagaggggctgaaagaaagtcattaaccggcggccaaacttagacactctaaaagcctcttccaatcgacgagcgttcaataaaggcccctctatgatttccatgagcacgtcgtaattccacttggtatgatccttggtgtaaagtacctttgtcgcagcaacgataatcatgggagtagatacgtgttcagccggacggtttttttagccagcgtcaacaatagctacctgactgtctaccaaagcggactggaattgtcgatcatccatctgcatccccatcctctttcggacttgctcaacctgacgctgtccgcgttcgactgggtctgactgagagagagatcgtcctcgcttcggtgtctggttcgaggggaccaggcgtcgatcccgcaccgaagccgttatcgaagtcagcgcgtctagggctgccacacgaccttgagtgtcgtctagcttcatcgccgaggagaataatttgggcagagtctgcacaggcctcgcctccagagatctcagcttcacctttgctttagattataaacagacttgcctacttgcctgaactttcgcagcgtatttgagagggagtagtctggcggacatggccaacagctcgctgataaggagcgtggctttcctcgataatatgggtacttgctcttccactatctccactaacgcctgtgcgattgtaaggtcatctgctcattggaaagttcttcacgcacgtcaatgcatacctcgaggatccccgcttcaacaaagaccgctaacaagagactgatgaagtggtcaatgaaatgagacctggtcgtgggtgttccagtgcgggaggctaaatctagtgtcaaacggtgcgtatacgttgagcgaatggagtgataggtggatccgtatcaatagagactgacagggtgctctctttccatcttgtaaaaattcatgaaaccacgaaggcgtttccaaccggaacaactggaaaaaggtgtccaggagaacttcctatatacgagcgtgatcaatctactgatcgctcggccaacattggctgcttcggccggactgacccgcatttccgtgactggaatcctcaacgcttcgacgagacttttgatatgggtcgactctgacatgcagcatagcgtcaaacctgggcgaattcgtgaaggccggtgtaaacattagacatcatctgcatacttgagcaatcaacaccggtcactgaccagaccatgagcggagaacggtcaaggtgttgatggaagttgatctcaatctgtccaaatgcacagagccggagccataggcattcgtgaaaccggagaatatcgctccaagcccggtatcacgggacaacgatctccgatcgtccggcgtatcgatgagcgatatcagcacagaagtcaatgattgcgtaatgatgtagggcccgttctcatagatctgcaagatgaacctgagtccatccgctcggatgagactcgcaagatcgatgacggctgatgaacagaagatcaacagagtctcaggcgaaacacgggggtatttctaaaagactgacctatttccgcgagggtttcaaggctaacgctttggaaagcgtcctcggggttttcggccatacttaccagaatcctgaccaaaccctctgatagcaagggatcgtcatgcgcaatgacggcatcatcattgacatttgttctttcaggtcctgactgagcgggattggtcgaagaattgtcaggcaatgacatgatcgaccttatcatgtgcagtgcttgctccaattcagggttctgccgatttgcccgagcaaaggtgctgacatactaacattaacagggataggccagacttaatgaccgatctctatacgtaccgaatcaacaaccattcgatcccttgctttcgaaggatttcccacgcagttcgatctcgcataaaattccggtacagcctgtaacaagcggatcttaagggactgggataaggctccatagcgtaacacaaagttctgttggacaatacgaagaaatcagcttggcttggaccgcacgttactgccgtctaatcactgacacgtctatgagttccccaaagtcgatgccagaaaccacttgatacgataatcgggcgaagcgtgtcaagctagctatgtaagggccgacctcccccatagtccgctgctctgaatgagcaagtggctttagatcgcgtagccgcaacagactttcccgtgctttgctgcgaaggccatcgatgacctgtgggtccatttgttcctgaaatccgtcattgttgcgatgtgtttcaggccacacagcttgtccgagagacagatcgtcgtcaagtgattctgtcgttacggaccgctgactgacactgcgctgatctctcccaaagtcaccgctctctattgactgatgccttagcgaagcgacgagagcttcgttgttcccttctccatcatgtttgccgggagaatttcgtttacctttccgcaaccgcgaagtgtgcgacgtcaagcgatcggaggtgttccatatcgatccgctaaattcggaggcaagggtcgaattggaaccggtctggcgcagagaccgggtcccaggtgattctgccggtctttgcaaaggccgccgaactgcgtcatcccgggcggaaaggccgcggggcatatcctccattccccggtctactcggccagatagcagggtcgatgcagtactttggtcttctttactctgccgcccggaacgattcgttgaagaacccgccgaagcatagttcgtgatggcgttttctaagctccttatcttggaattcgaggcggcaagctcggccaataccttagcccttagcggtggacgggcgtcttccggtatcgaggatatatcggagtccaatgcctgaccgaggtaatcgtgagaaatatgcgcttctctacttctctagcttcgaccaacctctaggaacttttcagctccgaactggatccgtttctcaatgttaagtctcgccgacaaagtgtcgaactgaaaagtatcgtttttagatgatggtccaggtctgtcctggtccaggtctgtcctggaccaaagcgctcacctcggaagttccattcatagcctcctcctgaaacggtagctttccggacgtttgaaaagcctcatcccgcctagtgaccgtgtgattgccatctgattggtgaataggagcctgcattttgtaaagagggtatgtgccggtgcttggccgttgtcgttccgaaggcgccctgagacgctcagggtgaattgttccggagaattggcatcacagtgtgtaaacagtctaactcttggcttgggatctagctacgcaggcattacgatgtagtgctagtcgtcttttgccagtgttggttaccacgtcccgacttgcgacttgtgtatctactttcaaaatattgagaagcgagagggctcggggatcccaattaactgactagcaagcatcatcatcatatcatcatagtcgcgatcacggactcatccgccgccgccgagggggattgggtaggcggcgcgaatataatacactgtgaggaacggcatcgagattcggttccgaccgattttatgcagctttcatctcgttccaagcccaggttgattgcatgtcgggacgtaccgacaacgtatcatcttgttatcacgcctcgctattaccgtacctatcatcgacaccgtcatcaagcaagtcaccccgctatagaattcacctgaaaccaccgacataacctccagcacaatgcatctcatgtacacattgaatgaacagggcaacaggtgagtcgtgcggcaagtaagttcatcggttgaaacggccgagctcatctttgctcttcgatcttccatctatagggtctacactctcagggtatgtccttgcacagagatccagccttttcaccgactctaaccggattctgactcaccctctgtcccgtgcgattgaatcgttcagaaaacaacccctgccggaaagcctacccgatcggcccaccctgcccgcttctcaccagatgacaagttctctcgacaccgagtcacaatcaagaagaggttggtactcgtgttgatttgacggacgattcctcactgaccgttccactttttcaccctcaggttcggcatcttgcctacacagcttcccgctcgtcccctctagaagctagaaactaaggattaatgcacgagaggactgatgcatagcacggctcgtttcgtcatatcggacaggggacggaagatacatatcatagaccggcagtatgtgcgagctgtagactgagcattcgagccaagcgctggcgaatcctacctgggctcaaacacatgtccttctgctgatcgcacataaatgtaacgaatgcattacgcacacatgtatatcaattccgttttgcagcttctcagttgactaccacgatggtcggtgatcatcacgtgtaaaggcctaacagcttgtacgctccttccttcaatatttgtgtcgctaaaaacaacgtacaatccgtctcgaaccgggagatacctcatcgctcggccagactacgatgttgtctcagctgcgggtgcagcttggcgagcttcctgcttccatctgcgagcaagtcagcatatttacgagctcgggtcgatcggaagggactcacctgcggttgatctgcgaaaagcattcggggcagagattgtgcgagagttttggtgcaccgcagccggggcaaagggagatgtctgatcaaccacatcgttcagcgtttacatatcgatgctgataaaagacaggtctatacgaactcgtcttgttcttcaggcctttgtgcgcactcctcatactttttcgggagtgagagaccttcttcttgggcacagcaagcaggaaaggtggaaacaactccacgagagaatctacgagtgattgtaaggaagtctgtacacgtgccggtacgtccagggcggccggcgatatagcaccaagtacgacaatcgatcgatctacggtagtaccgaagcgaggccgagtcactcgggcgaccagccttggcaaggcggcggtgagacgggaaggtccggcctgggcgaagctaatagtagccatgatttctatgagtgatttgggcgatggaattgaacagctgttgccctgccgttcagctataatcgtttcgatgacatctatcagggtcaactactactgcccatcagatcacgctacaacagctcgtgccagtcgcgcttgccaaaagtcgcgcttttggcctgattccaccttgtgagcccatatctcacccacgtatcatacgttcaagcttccggtcgcttagatcgtttgagcaccgtcggtcacgctttcatgatcttcttcttcagggctgacgcaggtttggaaatatgaatttgtgagatcacgagattcgcgatacgttatgaactgatacacaaactacccggctgtgatcgcctatgacagacattcggaggcttatgacggagttccggaagtgaaattacgggcaagtttagatgcttagatggaagtagcagagttgaacgtgtctcgtctcgaatttcgttgtgccccaagaagagatagccctccgcatcgacttcgcgaaacacagtcgcacccgacggccctcttttgcgctcgggtcttcacgatgagcaggtttgtcgatggaaacgcattctcggtcttgtccgtcgagcaggcggacgtccatgattccaggcctcgaaaacgcaacaaggctgggaaacatgttcaaaaggagaccgtacagaaagtccccaatgtgtcgcgggagcgaaagagcgagcaacgacagggaccagccgagacctcgccgctgtcctccaaattggcaacccagtccaacggcctacccaaaggggcgcaacgcaagtcgaaagatgaggtacgttgagatcttctcctaccattccgttgtttaacggaattgccttgtctgccgtcatagcgcgggaatcacagcagtccagcggtcaaaagcacacaagtttcaactggtggagcgtctagctcgtcaccaaaagagccgttcccaagcgatatcaaggcatcttcgaaggagaagaagcacaagaggaccgcgtcatggacgtcctgggcgagaggtcgcagattcgcattctcgtccggaatagcaataggcttggcgttctctgcgtatcgcttcgctcccaaagacttgccaccggatctcttacgcctgttctctccggacaagttcgacatcggctcaatgtccaattggttccaagatacatctgggaccttcccctcgatgaacttggacggctggggctgggactgggattggaaagagttagcagccaacctctccgttgtagagcagacgagaaaggctttcaactcgagagaattcacggcagcagaagatctcatagccaaggaacctgggattggggctcatttccccgtcattttgatccctggggtgagtcacaacacaaggtcttgccaccggtataaaccttgaagataaccatgtctgtcattcacaactcgatggtatgaccagatcgtgtctaccggtctcgaacaatggtcaacaagcaaagtagccaaaggctctttcaggaagcgcctttggtctacgacccaaatggtatctgccgttctggcagatcgaaaaggctggatggaatcattatcgctcgatccagtgacgggcctcgatccacccaatcatcggatacgggcggctcagggtcttgatgcggctagcgagttcatccagggatactgggtatggcaacgtgtgatcgaaaaccttgcggccattggatacgacccactatcaatggaattaggtgagaggccgcgacgtggtgatatcgatagaccttactgaaagcatgatgagctttcgttactttcagcttcttacgattggcgtctctcttagtaagagcttgctcctgatccaaaggcgtagttgcacctctttctgatcgcataacacagttacaacctagaagtccgggatgccttcttcacgaggcttcgcgatcgaatcgaacaaaataaacgaatcactggcaaaaagacagtactcatcagccactctatgggtggctctatcgtgatgtactttttgaaatgggtcgaagcctcaaacaacagcgaaggtttccggtgtggtgaaggaggcgatcgatgggtcgaagatcatattgaagcccatgtcggtatcgctagtacgctgctaggggtctcgaagagcatgacagcgttcttaagcggggagatgaaggacacggttgaaatcgtgaggtctgaaagtcggcctcaggcttggaattattcttaaccttcgtactacagcatccagcaggctcgtgggtcttggaaaagttcctgtctcgcaaggaaagggccagtcttttcagaaagtggcccggctcggctagcatgtggatgaaggggggcgatcggatctggggcaatcacacgtcggctccagatggtcagtccagggatatccacctcggacggatatatcgactgtttgctgaatttggataacaaccgtgaacgttagacccggtcaattgcacagacacgcacgggcgtttcttctccttcagacagacatcagactctggtccgaacagttcccatcagccgaaagcaagcgaactagacgcggaacacatccagccgaatctcaccatgaacgaggcgggggcatacactctgatacatacccctcaagactttcaaaggatgtacagttccaattactcaaacgggtttgaaaatgatgttgaagtactacaagccaacggaaaagaccatcgaaaggtacgatatacgtgcgttccgatcggatcatctgcgctaataaccggtttcacgagtagtgggcaaaccctttggaggttcagtaagtgaggtcgtagcacaaactggccgattcgttctgagaaacgctggtcgattccatttagacttccctatgcgccatcgatgaagcagtattgtctatacggttacggcaagcctaccgaacggagctactggtatatgcaaggtcaattcgaacatgatgagatcgtgacacagggagacgatgcacaggtcagcgagagagatccttagtcgggcgtgactagtcctgatagcggtctctttcagtgcacgccggatgaactgcaacgtatggtaaacggctccgcaatcacttgcaggaaacccttggatatgcctatggcccgcaaaaactggatcgataccgaagtcaaccttgaaggctcaattcctgaagtgaggaggggtgtgaaattcggtttgggagacggcactgtacctctggtctcccttggcgccatgtgtgtcaaaggctggaaggacgagcgctggaacccagcacgtatgcccatcatcacccacgagttcaaccatgaaccggaggggatggatttgcgcggaggtgcccgttccggtaagttccctggctattgcagcctgcgcatatgcgctgacctacggctcgctttgtttgctgcagcggaccacatcgacattctgggcaatcaccaactcaatagcgtcattatgcgaattggtaagcaagtccgaccgaccttttgaatgtccggctgagaccttacaacgaacagcggcaggacgaggagaaacggtggaagacaatatcgtttcagagattgaacagattgcgaatctcattgattgggatgcttaaaatgcatcaaacatctctaggctctactagggtacaggggtgtatagatacaagatagcttcattagatgatacaatttcattagatgccctcgataggcgtatcccccattgccgagtcttccggactggataatagcagaatagagtgctgcagttcaacgtcgctttgtggtggtgaagaaggcggaagttgcgagaagtccacaggtgagagggcgaaagcaggatcaaagcgatttttataagtcgagtcgaaaaatgagaaagcttcatccacgaaaggaactcccagattaaaggaagcgtcgggatgagctgccggttcaaatgcccatggatcagactgcgtgtgatcgtgggtcgcgtccaggctgaataggtgatcgaggcccggagcttgcagccattgttcggtaagaggggaagatgtctccttggggtcgagatgcaatgtcttgacgctggcagaatcatccgacagtggaagcgcggctgcgagcgaagtggaggccaaagatggctgttcaggagctggcgtcatcataggccaagtgaccgcggatccgtcaattgaccatcccatatgattgataggcggccacgactggatttggccttgtgacatggctcgcctcgagtcggctaaacctggaacgcactggaccatgtcgtcggcaagctcgtgggcgacaacggagtgatgctgagccgcgtgcctctgagactcccgctcggcaatttctgaaagagtcctcttcatactcggtcgtgagcgatgactgcttgccgtggcgtcatcggggagagccaaaatttgtgggatggcaggctcgctcatgacgacaccgatgcctcgtccaggagtccgcctcgccgtcttgttcggataggtaacggatctcggcaagactggcgcgcgaatcggatcgggactcggaggctcggccttgcagatgattgcggaggaggctatcgcttccaacaacgacggccttttttcggcgttttttgtccttgcgatggattctccaagcaaagcagagttgtacccgtaagtcaaattcgagtgtgctgtttcttgtttaataagcggggccatgcggcgtctttccccgtcctcttcgtcagtttttcgttttttccggtcgcctgccaagctcggtcccagtctgcccttggggatctgatcatgggggatggtcaaactttttcttttgagagaggaagacgctgacagcgatgcagggtaacgctggtgacttggtccactcgcgttcgggcctgtgtccgcggtatgatcgcgcacaacgactgggtctgacgaatcgaggcccagactgctgagccccaaagaggttccatgaacaggcgttgacgctggcacgacatcagccatctgagtcggtgttttgcgagcgaggttggccttgatgtcaatcctgtcagccttgatccgtgtcctgcgagtttcgacgacgctctttgtcggtcgcgcatccctgccggtgtcttgcgcctttctcgcagcggccgattccaccctgcggtaagcagcaggccgaggtttctctccgaacactaccgttcgcagtttcgcggtctgttccagagagactggacggccgagactgcgcaatttgatctcgagcatcaagccccagccggttgacgtcttatgcgattctgcatagttctcttcatcctgcgaaccttcagcttcgtcggcttccttcatggcgagtgccgccagaccatcgttctcgtcaagggtcgcttcagaaacggctatattgtgcgatgagctctcccgcattaccggttttcgtcgtggcgcgaagtctgtcgtcttgaccacgctgcacgcgaccaatgttttcccctggcctggttcggtcagaacgtcgtacaaagtgcccttgccagtccaaggtgcttgatgcattgagcccttgttggaagtcaagccacgcctgattcgagctgattgccgagcaggccatctcgaccccgctggagaactctggaacggattcaaatccgatgtaggatgaaggccgggcgacgattccagggcatcggggtaaaagacgggagtcggcggcatggagaacccggtgcggtcttgatcgcgatagcacgaagatgaggaagtcaggccgggtgtcaagccatccgatgacgccgtgaaggacggtctactgagaaaggcgaggcttcgggatacagtaggtcgtatctcgtcctcgatagacgggattggtaattgattgctaggcacgtagacagatccgtcgctgatctgggttgatgggatgatttcgggtcttgccattgggcccacattcgatatacgtcagccatggcacggcgatcgatcaaaaatgactctgtcaaactcacgacgctcgacatatgactttgaggacatctttgaggctgacgctgcctcgatgtgtttggtaagaatcgttgcgtagggttgcaggtcgattgtcatcagcgtgaatgaagacgggtacattggatgttgaggtcgccaagagtggttgggcgtgtgatgggtgtcggtaggaaattttgactaaggcgaacccatcagtgagttccaatacttcaaccgttatgattcgatcctgccggagttccaacacttactgggtagctggtgaatctggttggtctcgatcaagtctggccaaacggacacgtccatattgtctgatgagccggtagacccggcgaagttctttgtgtgagaccgtctcctctagctcttgtggtgcacgccgattgactgggttatgtgacgaaacgaagacacaggagaatccagcatagccctgagcgttactgggtgctgaataagaaggatgagcactggatagtaggctgattccaggtcaacgatcgaatgaaatgcaaattagtcgtagtttgatcctctctacaacatcctgcatcctgatcattcgcgtctcgatcttcctcttcgctgacgcgactccctccctccgatccctcccttcccctgccccgactaacaccccctccccccccactttgctactctatagtacatggacaaacccgtccatctccacctgaacgctaataggtacatcagcgggacgttgagaggttacgacatgttcctcaacctcgtactcgatgatgccatggaggacgtcgggggtggtgagaaagtgaaagtcgggaccacggtgagtgacagaaggcgaccgcttcgtggcagtggcagcatcgagagcagcggtagtagccgggcgtatcgtcgctcttggtataccaacggcaatcgacgctccgagcgcccatctccccgctctccccgctcgctacataagacgaaacatcagccgaactgacctgaccattcctccctctccccctcgtgcccctcaccctctcgtgcccctccccctcgtcgtcgtcctcgtcgtcctcgtcgtcgtcccgggcacaaaaacaaacaggtcgtacgagggaactcggtcgtctcgatagaactcttgcataatcaacgtgtttaccggtagatccccagggtcggcgtagggtcgggtcgggtcggctgaggtcatcctggagcaacgttgggatgggatgggaggaagagggagttgggagttgggaagtcggttttgggtcagggtcggagttggggggagtggaactggaagtgcaagtggggacgaggaatgggtacgagggctgggagtccttctcaccgggaacgaggacatggaatacgtcgacgactacgcggtcggacgagtcgaacgaaaagttgggcaggacggacgggactgtgtctacccctggggcgcaccggactggtcttacggacgcttcaatggtcgacccatcaacgccccccctctctctctctgtctggtcgcccgctttccggttcattcttcgcctcgcctggacacgcacccggacccgaacccgatttcaatcatcgaaccatcttcttcttacacccaaactcacctggagacgaggtggcaccggagagggagtttgcgaggtttaccccgcgagccggactttttttatgttttaatctgcttcgtggtcgttcttttccctgttttcttcccctttttttgtactacaatgaatatgacgatccaaacgatcgcgctccgatttctcgccattcgctcggtacacggcgccggcaggtgtcgcggcgaatgcctgtttgttgatggtacaagccatgcaggaggaggagactttcccgtggactgccgatcaactcgaccgggtagtcaaacggtcgtcgacctgcagggcggaaaggtgggaggttaggtcggatggagatggagatggacggtggattaaccgatacgcggacgttcgggcaacaattcgtccaacaatcgacaagtcccaaacgtcagtcaaacacggaatcgatgcccgagtcgagtccaagagcacccatcctcttcttccattcgaccgtgcccagtccctcgagtggctgcaagggatgtgcagcaagacgggaatcagctgcggttctcctcgatcggccgccggagtgcactctgaggtcgagtacatgctcgccatgtaattgacgaggtgtaggtgtttcgcctttcctcgtgctagctgtaacgtctttggcgagcggcgtcttcgttaagaaacggtttattcccgctcgttctgacgccgatgggatggcccaaggaaaccccttgaggggacggcgaattgcattcgataccccgaaagcttgagaccagttgacagacgagagttacttgtatatctatacgatcaagattcggctcatgcgcgacgtcgatcttagatgctgaaaccaagccaaccccaacgcgctggcactgcgttccctgcacgcgcggcgccggaacgtagacttgtttcataatgtttgtgccgcatttcatgagtaacgttagtgcaaggctcggcctcccgcctttgtcaaccctgcctcgacaagagaaagcgaacgatgacgtcggagtcacaagctcaagagcgacctccgacaaagagatcggccgctgtttgggacgcctctgtgacagctgcgctttcaacctcgggcttgctcccgccctcttcgccctctctggattggacggactttgagatcgctcaacctccgacgtcgacttcgactctaactgaagaacccctctacacaatacacatgctcgtgtacaaccttccgaaagtatgatggagacgcagctgctccactgcgccgaagcaatgtccttcgctgaattgctttttcgtccttgaccacccgccccgccttcaccgagcagcggcggagataccgggtaaggtggtccatccgaagtatcgatcagcactgactggtctgtggctgaagaagccgctctttcccgtgaaagaatacacagtgtacagaactcttcaacagagccctgcaagcgaacgtgacggatgatacacctccgactagagctggaccgatcaccaccaccccagctttcttcacttggagggcgtcgtggatgcaattgacctcggtcctgtctcaggcagctgcggtatttttccctcctgccgtgttcatagctgtttcacgcctcgaaacggacggccagagcgttgacacctctgcttcgatcgtcatgctctcgcgctccatgtcgtccgctcagcatctcatcgcaagaagctcgatttgggcggtgtgtgccgtcgcaagagcctcgtggtgcatatgattcgcttcaaattccaaggcagcggtcacggtggcatcgaccacgtcgccggtagggccggggacgaccgatactctgtgcacatccatcacctttcaacaataatgttctccagtcatgaacccatgtcgatgctgatatgaatgccggtatacgtatgaccccctgctcctattcgtacaaacagaggaatgaaacccgaacccgttcccgaacccggaccgaccttcatcggcctggccctcgctcatcctagctctcgcgtctacttttgcttttgctcggcgacctggttgatcaaccctttgccggtgagggcggaagcgatgttcttcaacgcctgacattccatctgaataacatgactgcgcgtgagtgggacgagcagtactagtggaacccggcgtcggatgttcagttggggacactgaccttgcgttgagtcccacgggcttcggttcccatatggggcaggagggtgatgtggtccatctcgacgagtcgttgatcgatctcgggttcgttggggaagacgtccagaccggccgagtagagctgcagggtgggtcggatgcggtgaaaacgaaaacgaaaaacaaaaaacgtccatcagggtgtgcgttggagggtaaaggcgccatcgcccgacgctcaccttgccgttcgtcaacgcctcgacgagtgcctcttgatcgacgacgccaccccgggcggtattgatcaagatgctcccatccttcatcttttcaaactgttccttgccgaaactccccttggtcttttcattgagcggcaagttcaaactgacgatatcgctcctcttcaagagttcgtcccgatcgctcacgtactcgcattcgaacgagggggccggggagatggggttcctgttgtggtaaatgaccttcatgccaaacgccaagcatcgttgaccgacgacggatccgatccctcccatcccgatgatcccgatcgtcttgccctcgggatcatgagctggggaaagcccttgcttccatttccccgatcgagcgttggtctcggccttccagtattgacgcagggaggagagaatgaggaacatggccgtcgtcgccgtagcgtcgtccacggcccccggggtgtgagagacctcgatcccacgtcgagtggaagagacgagatcgatctgatcgtatccggctccgttgtgacagatgtatttgacagactcggggagggcgtcgatgagcttcgaatcgaacacgccgatcgagttggccgagtcgttgtgtctgaacgagggggcgcagggcgggggtggtcacgcgtgggtgagctatgtggtcgaggtggcgacgatctagggaggtatggtagatgacttaccggtagatggcgacgatatcagagtacttgcccttgaggtcgctcatgaattcttccctcgactggctcgtgaaaggctggggcgagactgcacgtaagcctgatgtcccgtacggcatggcgtgtacgtcggagctggcccggttgtactcacgacgatctcggcatcagcagcacccaggatctccttggcatcctcggtagcccagacgaggttctgtttgacgtttcctacagcgtcaaaggtggaacacgatcagctcataggtcgtcgtcagcgtgcgggcatgcgaggatgacgtaccacagatgaggactttggcaggcatgatgggaggtaaagtgggggtttgagtgtgagggcgtggagaatggacgaggaatagagtagatataatgctacgaagagagctggtcgatagctactgttactgctggtggtgtccgggggggttcttatagatcgctcgctgacccccttgaagctttcggtgaaaccggtccggtccggttcatccgcgcaagaatctccccgcgcggaaacgaagggtcaagcaggcgagagcatgcgagaggtggaaataacatcgggcgagcaggtcagggtggaaatgacatgatcgagggtggaaataacacttggcatcagtcgcggggggtcagtcaccgtgtcttcaaggtggaaataagctaaaatgccacaccaaactttgtttccccgatcgatgacgagtatagttaacagtcagtatcactcgaactcagagaaatatgttggaattcacaaccctctgtatccccttttctccgcaacctggcacgaaccaccatacctcgtcatcatcaccatcatcaataccatcatcacctgatcaaactgctccgacgattcatacccccattccgaaccctcgcaagacccctgatgacggccgcgagaccgcctttcccggcaggatggacctcgatcgacctgactcttgacgaattatcactcagaaagtgagtcggagtcgagtcagactggtcgcctgcccatctctttacgattcccaacgtgatatatcacagtcactggtgggaagatactaaacccctcgctctgttgaacctcggcagcactttacccgtcggacagacgttcatctggcataggatccctctcccgcccaccacccgaccttcgtcctcgataccttgctcaccaagctcgagcggactcggtttagaccacacgatctcgagaacgggaggaatagatggagaggatatggtctttcgggtcaagcatcgggtgaagctcgaacccgaacccgagaccagtttgacaccgacgtgtccccaagtcaatgtcaaggtcgagcaaccccagactggatacacatcagcgacagatgaaatccaggaaaaaccgatggacggtttcatcactattcagcagggggaaccgggaccgggatctggagcggagtcggggatggatttggacagagggacgcgggtgaacttgggcgtacatgagcgggaagatggcattgggttcgtccccgagaagaaagtcgacatcgacatcggcgtcaaactcgagtccgagtccaagcttgagtccaagcccgaacccgatcggaaagaagaagaagaagacgccgctgacgacgacgacccggatgaacctctcgaagaatactctcgggtcatccccgatccagaccgggtcgtcctcctccgtcaaaccccttccaagatctggatcacttctgttctcccatcaacctcgacctcgaccacagtcacagctaccacgtcaagtccgggttcaatctcggccgatggatcgatctcgtacgacgaggaaagacgggcgagggatcgggcttggttcatggattattttcaactcccgatgatgctaccttttatcccccctttgagtgcgaccgtagtcacgacgacagcaacaccaacagttagcaccattccaatcgatcaagcgacggaaaccccatcccgaccccgacctcgaccgctcgagttgaaaagccaataccgacattggaaggacctggatccgctcctctttggcaaagcgtacgatcgggacgagctgcccgtgggggtcagggtggtcaggcaggaaggatgggagtgtttaatctcgtgagtccaggtttggggttctcgttccttttctctcttctcttttctcttgttcggctacattgtttggtggtttggattgggttcggagttggatcggcgccaggcaggctgggtaggggtatggatggagctgtgggtccgtcttccgtcgcagcagcacgtatatttgggagcgcgggggggacgcatcgggaacgttgttgatatcagtcgatagaggctgattctttctgaattgtactctcctcatttgaaaacgaatgacaatgcatcgcgtccctttctgacaataaacgcgttcctggtcacggttccctcaaccctgcgacagcttcatcacctcgtcggccaacaacgtaccccgaatcacgtccctcttgcataaactacaagcgcactactcgcccgtcctcctctccctcccccaccccgagctcgacccgttgacgacgaccgcgattcccatcgggccggacgaacaacccttagaggtcgaaccgggggagatcgaataccgatcattccccccgccctctgccctgatatccgatcctcacctggaccaaacgttacgcgccctggggttcgggtaccgcgctggattcatcgtgagcagtctcggactgctcgttgccgagcacggcagcccggacctcggggaaggctccgaagggggtacgaggacgacgcgaggggtcaaggcgttcttggaagggttgagacgggagggggaagatcaggagcaaggtatggattggaggaccgagttgatcaggctcaaaggtgtagggagaaaagtggcggattgtatagggttgatgtcgatggacaaggtgagtccccgaccgaccgaatggcggcgatcgacccggttgtcacgtgattttggaagcgatttcctgaatttccgcgacctccacctcgacgtctcgacgtcgacctcgtctcaacaatgactacctctccctcttcatatcgaccgatggaccttgtgaatagccaaacgtcgtcccaatcgacacccatctgcaacaaatcgccgctcgacatcctagtttcccttcgaaactcaaacacaaatccacctcttcggaacccgtttacaaccaggttcaagagtttctcactcgactctggggtggaccatctgaatcgatcaatctaccaggcaacggattcgcaggttgggcacaggccgtcatgttcgccgctgatctcaaaggatccaccgcagtcgaatctagcaagaacaagatgaccgccaacggagctgggaagaaacggaaagctagcgacgaggggcgcgaaggcaagggcggcaagagcatcaagtttgacaagcacgcgctcaagactgaacagggttcctcggctggatcgtccaaggccaaagaaaccgccgtcgctgccaaggaattcgcccacccttccaaggtcaaggcattgcggatgttgcccgcgctggaacagcagttgacgtcgacggaatacgaccctaacccgctcatccccctcctctcgctcgcccgccaccccgaacccgaggtcgtccacaaggccatctgggcgctctaccgagtgtttgccaagttgatcgccgaggatcggttgcaaggtctcggactcttgccgttcgaccggacgaggacgaacgaagtcaaggatcagagcaagattgtgcgccgatggatggaagagaggttgtacgactatgccgacatcctcgccgggtgtttgcgggacagggaaccttcgttgaggaaatcagggtcgagcttgatcttttccctcttgccgcctctgtccgaaaacctgtcgaaccatatcggacgcccgcagatcgccacggcctacctcgcctacgtcttgaacgcgctcgtgctctcgaccgtgtcactccgtgggagtcgaccgacgggcaagtccagcgtcggaaaggccgtcaacaattcgacgggcttgtgggagacggtcgatgagaatcaggcgacgatggaggataacgagttgcccgccgatgtcgtgcacgatgcgggcaaaaagctggccgattacgacgacttgcgatgggcagtcttcaagggcttttcgtaggtctccctcggtatcaattcgctggccattcttcgctgacggtacagctctatggcacagtaccatgatcgagtcctattcgaccggatcttttcccgtcggcatgagcggcaacattctctccctcatccttcccctgaacaacctccctcaaaacgccgacgacatcaacgagttttactttccccacctttccaaaaagcccgccaaaaattcgagcaaaaaggtcaagaccgtcgcgaaaccggggaaaaacgccgaaaacgcgcaaagctggatggactttttcgattcctcggacgaagaatcttcttccgaagaagaggtcgagatcgaggtcgacaagaagacgggagtcaagaggaagcgggtcaagaagcaaaaggtgaaaaaggatgtgcacaacctcgtttggagcgtcgtcagccagaaaaaagtctttacggattgttggttgggagtcttggccatgccgtacgtcaggggcgtcatcttttgacaacgtgatcgacgtcgcaagctgagagattttgatgctccgttccgcagcctgacgcaaccagagacgaggtcgatcttgctcgtcttgcattcagtgcttttccccaacctgatccgagggagggtcgtcaggataaccgattggctaggtggactttgtgaccagggcggtccactggcgctactgtcattgaacggtctcttcatcctgatgtcgaaatacaacctgtgagtcgcggtcacgctcccatcgcgccagttcaaggggctctccgactgatgccaaatttcgatcgttacagcgagtatcctcacttttacaggaggttgtatgggttcatggatcgtgaagtcctgcacgtcaagcaccgagcgaggttcttccgattgaccgagacctttttacgatcaccgtcagtcgcaaactggccctacatcgttcacacctggtttacgcggactgaccgaatgtcatttacagtctattgccggcctcgctcgtcgcgtctttcgtcaagcggctcgcgcgactttccctctcggcacctccttcctctgcggtcatgaccatccccttcatctacaacatgctcaagcgacatccttcctgtatgggcatgttgcaccgaccgaccgcggtgatcgcaccgtctggggccgaggatggtgatgagaacgattcggacccctttgacgccgacgaaaaggaccccctcaagacgggtgccttggattcgagcttgtgggagctgaagagcttgcaaaagcactacctgagccacgtctcgacgatgggcaagatctttgaagaggtctttaccaagcccgagttcaacctggacgatttcctcgatcacacttatgccacggtgagtcccggccggacgttccctgtcgaacgcttcgctgatcctggcgggatcccgatttgcagctcttcgagactgaagtcaagcgaagactgaagaacccgccggccctcgccatggacaagacgtcaaacccctttcccttgctcaaagacgaggcgccagagaacagcgacgtcatcaacgagctgttcaccttcagcaagtaagggacacaatctacatgagctatgggttcgcagaggtgtttggttattgtaacatgtagtgatccgcttgtatcatatcgctgcactcagtgacaccggtggtgagacgtgtcatgcccatgcatgcaatggtgctttcccactggatatgtcggaggtcctcagggttgatgggcgaagttgacgcaatgcaaatcacgtgaaacccatcttgaaatgctcatgagtcatgctccaactttggctgatcagagccgtttgacatacttgcgactagcagatatcacgcagtatcaccaagacatgcatacagcttgggacaacattccagccgactatacccaaaaggctgcatgtcagtcatccagagagccatcaggttacgaattctttcatctctcgcatcgcgtcgttcgatcatgaccacctcaataccgaagcccgcccagcaaccccagcagatacagccgaccccgaccgaagagatctttttcggccatctgaacgactttgtccgagaagggaggctacgggtcgaaccagagatccccgtgaccgagtgtcgaatagcaggtggctgggtacgggacaaggtgagccaattccgagcagttcttctgacccaatctcataccgatcgaatattacttggcaactcgtcagctgctggggttaccatcacacgacctggatgtcaccctttcttcctgtgcaggatatccctttgctcaagcgtttgtcaattacctgcgttctgtcccctcggccgagtctatcgagatcacctctatcggcaaggtgtctgccaaccccgaacaaagtaaacacctggaaactgcgacgacacggatcctgggcctagagtgcgatttcgttcagcttcggagcgagatctatgcggatggcagtcggatcccgaccgaggtggtacgccggactattactgccatcgtacagaggtacactcgaactgagaccaagttggaactgtttgcagcggataggtaccccgttggaggacgcagaacgacgggatatcaccatcaataccttgttctacaacgtacatacgagatcggttgaagactggacgggcaaggtaaagccgatcaggtcgtccgaggcttgccaggagctgctcgctgattccgggccggatatcgaaaatcgcagggtctagaggacttggcgaatcatcgcattcggacgcctctcccaccactgcagaccttctacgacgatccgctccgtatcttgaggtgtttgcgtttcgctagcaggtttggatatgccttggatcgcgagttgaccgagtgtttgggagatgcgaccttgatggtgagcgtcgataacagcgtccgatcacctcgcgctactactgtcttaccctccccttgccatctttaggaatcactgaggacgaggatttcgcgtgaaagagtcggcatcgaggtcgaaaaaatgatcaaaggtgggtcgcggtcctggccgattgtgggaatttgagcctaattccatgtactgcataggtcccaacccgcttctggccatccaactcatcgctggtctcaacctctaccctcatatctttgtcatccccaccgcccgaccttccacaaacattgacgaattcttccccgcaccccaccccatcagcgattctctcctcggcggtcagatcctcacttcgatcatgtcgggcgctttgcaatcgcacgtccatccggcgttgttcacaaagctcaacgaacgcaggttgcaattcatatggctagcgatcgcgttgctgccatatcggggaggtctgttgaaggaaaagaagaaggacattaccatggccgaggtcgtcatccgggacggcataaaggtcagtttcaagcgatagtatggctgaacctcctcatcgttccggctggctgataaaccatgcatgtacgcagttgggaaatactgaacgtgaagcggtcgcaaggttgtacgccgctcacgacaagctgtcaccaccgggtttccacttgcacgccccagaaaggcttcgatcagggctgggtgggtctctggttctcgtcttcttgcccacttcaagcgtgccgctgatcgtgcccgtggcataccaacaggactgatcctgagggaaaccttcatcaatgactcgtcgacggacactgcttggacaaacgcgctcgtcttctcgatgatcgtggacttgctgccgtgcgttcaactagacgatattcaggccagtaagtcggggcgcctgcaagtcatgatgaggatttgaaatggaaagctgaaggcgtcgtcgacagatgaacgggtcctggaagtcatgcagcggtatcacgaatacactgccaaggtcgaggaattaggtctgggcaaggccatcgaagaaaaacccagaatcgatgtgagtctgcgccgagccctcgatacctgggtgctgcctttcgaagaagttgaccatggccataccttgtaccaaaccacgcagggcaacgaactcaacgccgtcctcggcctcaagccatctcagttgaccaaatacctcatgctggaagtcgtccgctggcagctggacaatccgagcggaacggccgaggattgcaaggcctttttattgaagagtcaggccgagggtacgttgcccacgatggagagtcttgggttgggggcgcctgcaaataagaagaggaggagggactgagggagttcgaacggggttcggtcctgcggttggattggcgggaccaatgtcattacgcatgatgcgaaccttggctcgggaccctagtgcctctacacgagacaaatattccacttgtaacctgccgcacgaacgaagggtacgaggatgaatttcacatcattgcagaataccgatcactcgatctcttgctgctcatcagcatggtccgcatttcaccacgtagtcaggggacaaatgaagctgggcagatgaagcgcgtagtatcgagtctcaagagaagaaggaccactggccataaaccaaaggttggctttggtgtcgttcctcccaaacaaatgtcaagttttggggacagcaccaccaaagttttcacttgatagacaacttgcaaaagttgtcttgagcaaggtgaagattggaacgggtcgatggggcaggttagaacacaagccatttagggtagcgtacaagtcagagctgagaatggatttgggggtgattgaccgagtcactgttctgaagtccaacatgaagaccacagagtccttcagggcattcaaaagcacgagggtttcgtcgaaagtgcgtgtagatcgctggaggcgggataagagacgacgccaaatgcagaacgcgaagcgcagaccagcatttcagttgccgctcctgtatgcgactaccacttgcaacttgtcaccatccaccgacacggttcccgtcaactgttcgggcccgactcgagcgattccggttgcgtcaccatgcttcgcatgtcattgcccgagcgagagtttaatgacgcgagcgatgaccctgtcgtgacgcgtcgacgcgatccaccgtaccaccccatctcgatcgatcgcgtcgattccccgattcagccgccaaaggagggtcccatgggatcgtgccatgtcatctcgtttcgcgctacgtcacatttcccgatcccaccttccttctcctctcttcttcgagaattggttgaagcaggttctccctctctctctctgcgctcgacgctctgcatgtcaccggcggtggcaggtggatccggtcatggagatgatgggaatcgatttcgtcatgcaggaccaggcagacgactcaattgagtatatatatcgacgttacgaatgatggtagcgatgcccttctgtggtcgtgactacctctttccctctttccctaacaaacgaatccactccacatacacgcacttcctctcaaactctaaacaaattcttaatcaacatgtccgactctaccatccccgttaccaactcggccgacaagaccaccgccaacgtcgctcaggatgattcccgaaacgccgagtctgccgtctctggagtcgttcccaagagtgagtacccccgtggttcatcctttccattccttcccgaccgtcttatgtcacatctgcgacgtttgctgacgtctacttgacttgttcatcctgttctctcacgtaggtgaggtcgaggacttgaaggactccatcggaggtggagagacccttgacaacgaggctggtgtccagacccgaggtcaggagaacgacgcttacgctcaggagaagaaggtcgacaatctcgatctctaagcagggaagttctgctcgtaacgtagagcgcgaggcatgaggagagggcatgggtcagagaggatcgtgtatcgacgcatcgcacgtcaatgtacatagtaacaattgatcgataataattctgcccaagtcgacctcccatacctactggcacgatcctgaagtttgcgttctaccttgctatcttgtcgaaggcgacattgtcattgaatgttcgagatgtttgatcggtattatatcatcacgggcaagacttgtgaagcgaatgatgactaagcaaacagccctccatcaacgtaacgaggcggatccgcgcgtggcgaccgaatccagaaccgaagcgacctacctcgttcaaccagagagactgtataaatccagaggccagtcgaccctttgactcgaggcttgtcggtggcgactccagttcagaaatcactcgcattacaagtccactctacccttccagagatccttgagaacgagaagacaggagcacaggaaccggacagggacggaaaggaggatcacatagagagctctcttcttttgggaatcacgaactcgttcacgaccctacgcctcttttcagcaaaagtatagactcattcagcataatcggtatcaccgagattatcatcaccacacatcacatcacataacgacaacgtagtttttcaagtttctggtccactgcatctcgccacgccctttgagagttaaaaagaaaaacagcatgtcgctcgccaccgccactccgcaacaatcttcccgactcgccgatggtccaggcctcgagcagggtcaacagaacggacaatcacaaggacaaggaccaacccgacgcaacaatcagaacaacggtaatcagaaccgacgaagaagggccgggccggtgaacccgggcgagatgggtggagacgtcatgcccgggactggagcgtatctgttacagcaacaacaacagcagcagcagcagcagcagcagcaacaggctcgtcccaaccgatcgaggcgaggaaaccagatccagggagatggatctgcgtcagtaccgccacctgctcagccgcagccacagcagcaacaacaacgacagcaaccgaacggtcaggctgctgctaccgataacgccgatccacagggacaaggtagacgacgaccccgaccccctagacatcggaatagacccgcacaggctcaatcgaacggggagatgcaaaccggtagtcaacctttgagtcgggtcccgacaaacggatcgacagcgggctcgaacgcctcgacctcgaacgctccgacgaaccgacgtgggcaagcccgggcccgtgggttcaactcgcagttgatcgaacccggggtgaatggggaagacgggttggatccctctgcaggcgctttcgtccccggggaccgagctcaacggggaaggaacgctgggaatcaggctagacgtgcccaacttcccgctcagggacagtccgagatggaccagccgccccatatgggtcacgcccattcggcttcggccagtgcgcaataccagatccaggaccaacagaaccaagctcggtcgaggattcaacctcaaacggctaatcgacggaacgctcggacgaggaaaccgttccaggggaacctatcgagcggacctgtcgatttcgaagagatgcaagaaagggcggtcatgggtggagctatccccgctgtcgagcgcaagtacagaggatggggcgggatgaaggatgaagaggatgggttggtctccaagctagtcaggggactcggtggggtcggcgggaactggctggaatgcgtgatcgtgagtcggatcgatacgagctcaagcttggaattggcaccgatctgacgttccccttttgccgcgctgtgatcagtgtttctcgaccatcctgccccagcaacccatctggtcgtgttcccctacgacctcgacagttgtcccgggtgaagtgtcgacaaacgcatgttgtttcacgcctttccacctctcgtgtatccaagactggtcttccaggtcgctcgccgaagcgaaagaaaaggctcgagatagggatacgcggatctacccagaagagcctgtgctcacatggaggtgcccggggtgtcagaagcgacgggtcaaggaggccaacaagtacgagtgttactgcggcaaggtcaagaatctctcgagcggcggtcaggctgcggtcgggaaggacacgacgggtgacgggtcgagcttggtcctcccacattcttgcgggaatagttgttcaagggataggtcatattgtggacatccttgtccgctccaatgccatgtgagtcgtcagccttcaggcgtacgcgttgttcgatatgagaaactgatacccgctctctgaacaccgcagcctggtccatgcccgccttgtcaggtaccactcgtcattccttgtccttcgcacaagaaggatttggttgtcaaatgttccctcgccaaagggaaagacgttcctgtgcctgcttgcgaggaaccttgcgaaaggctcctggcatgtcaagcgcatgcctgtgacaagctctgtcatgatggtgactgtgccaaatgcacagccagggagacggtcaaatgttactgcggtgtcgacgagagagaggtcgcctgtggatggagaaagagcgaggagcagacgtgtggggacgggaagacgacctggcagggcaggtttgggtgtgagcgggtatgcgcaagaccgtacgattgcggcaagcatacgtgtgaagaggtgagcgttgccgtccgtgacatatttgcaaaaagcccaatggctgacctttgccgatggccgtaggaatgtcaccctcacccgctggagactctgaaatgcccgagatctcccgcgctagttacgcattgcccttgcggaaggaccccaattggcgagctgtcctctacgcccaggaacgcatgcacagacaagattccgacttgtgcgctgcgttgcaacaggccgcgatcgaactgcgatcatccatgcggtctactctgtcacgagggtgaatgcacgccttgtcggcagatggtcgtcttgccttgccggtgtggatcgagtacggtcgagatgatctgttcagagaggcaagacatggagaaacatggtcaggaggtgctctgcgagcgggtctgcaaagccttgaggaggtgagtcccgatagctatgccgagaagctgtcgcgcaaccgtggctcatcctgatattgccacttgcgtagctgcgggcgccacgagtgtgctcgtttctgttgcccactttcttaccaagccaagtataagggcaagaagcgcgacattgctgtgttaggcgacgatgaagccggtctacacacttgcagtctgccttgcaacaagattctgacctgtggagtacatcattgccccaagcccgatcatcgtggaccttgtccgccttgcctggaggctagctacgaagaggtacgttgggctcccggtgttgttcagttcccctggcttacctttttcaccatcttccagctcggttgcaactgcggacgcaccgttatccaccctccaatccgatgcggtaccgttatcgattgcacctatccgtgcgcccgacccgcacctgaatgcggacatcccaaagtacctcatacctgtcacgaaaccgaagtgtgtcccccgtgcccatacttgacgaccaaaaaatgtgcttgcggcaagaacgaggtgaaaaacgtgagatgtagccaggaaaaggtgacttgtggggtcatttgcaattcgtgagcatggtttccagccccatcgagagcaagcgcacatcgcttaccagggtttcccacagactcctgtcctgcggatatcatcattgcatgaagccgtgtcattcggccggcgactgcgaggaaccttgtcagcaggtgtgccagaagcccaagcgactttggtaagcggattccgcgtcgaatagctcgaagtcgtcgctaaaatttttctcctgtttttatagcaaacatccttgtcctattacctgtcacgctccttctgcctgtcccgaggacgagccctgcagtgccaccgtcgatcaaacttgcccgtgcgggcatgttcgacagcgaaccgcatgcggagcttgtacagctaatccggtgtctcgggaagccgtgcagctcaaatgtgtctctgaatgtgctcagcggcagcggaacgctaggttggcagaagccttgggtatcaagcctaccgagaaactcgtggaatacccagcggaactaagatctttcgccacagccaatcacgcattcgtcctgactgtcgagaaggccttcaacgacttcttcatgggacccaaacaagcgacgcttttgccgcatacacctgcgcacaaacgccagttcatccttgggctcgcagagatttaccgttttggtaccgaacttgtcgatgcggacccccaccgtagcgtgcagcttcgtcgtcgaattgacagtcgaattcccaacccgctactgtccgcggccgccggtgcccctccagcagccaagcggcaactgggtggactcggcgacatgaagaaacccttctcctcaagtctcgctggtcctggctcgctggttgctccgaatccggtcagagggtggggcagtgcctcactctcacgacctgcaagtcctcaagtgcacccatcccaatcgtcatcaaatttgacgttaacccggtccacaagccaacccgccaacgcctttttgcagctgagaaggtcagaagccccgcaccaaacgggttcagggattcacaagctggatcacatcaaaggatcttacaccccaccacaaaagcgcgatttcgaagagaacgcgaaggattgggacgaggaagatgatgcttgaggagaaaagattgtgaagaaggcccaagtcattattaacgctatgttatattcgcgttcatatcgacaatgacattgatccatgttttacgattgaatgtcgcttttgacctccgcattgagatcccgctcgatacctgcgattagccgggttgttgtgacatccttgatatcgcgctttaatgccgcgcccagatggtgaattgcgatcttgtacaggaatggctgattgaccttggtgacccactgccgagccaaagcttgaaggtatgcaaatagcatgtcgggatcttcctcgtgcggctcgtagtacgcctcgagcgagcccgtttcgagcaggacctggttctccgacagccgtactgaccttaagaccgagggctgttccgaccatactagctggcgataatcgatggggtaagcctgcgaggtggggactagcaatagctgactgaacgtgacgtctgaaagtgacattgcgtcgtaaagctgaacaaagtccccataaatttgcagaaaagtggtgtcagccggagtaatggccatggacacctcgtccagcctggtttccggcaagcctttctctggttttagacagggctgaaccatctcgctcagtagactggacaccactgcatcgcggaagatctcgtcctctgcttccagatcccgtgcgctctctagcaagaacaccttcattgcattgagcattagtacggagcggttctgctttctgcgactaaacccctgtaacaggctacccaaaacgagagtcgcccgaaccatctccaagcgacttgcatcccaagctggaggaagctgcttgaagacgcccgacgattcgcgtcgcatgtattgctccaacgcaatgtaaagccaatctgaacgaagaggtagtccctcggtagctttggcggctcgatggcatgtacgtaacgtagcggtcgcacgtaacatgttggacaggggcgtctctggggtcgtcagggtttccagatccggcaagataccgtaatgaaggaatggcctgaggatgtataggccgtgacggtgtccaatctgactgatcatctcgctcggccagcctagatcgagcagcttgtcgacgagttgcatgacatgatcttcctcgccagggcgagccgcttcgatgattgatatcgcaaaccgagcgaattccattggcgaagcggcatcatgcagcatgagcatctggtatgcgagaacattgatcgcttgaggctgtggagtaggttggaagtcaagaatggcgtctaaatggtggacgagatcaaagtgtccaggcttggcgaaggtcgaaaagtctaggattcgaacgagttcgagcaggcgagccgcaaacatgacgctttcaagcggtcgagttccttgcggttggatcaccttcacgagtattgtctcgaggctttgcagcggatccatggcacgcagcatcgatcgtaaagcagtcttgtcatcaataccattccgctcgtgattcagctcacagcccttgatccaggctatcagcacgcctagggcggatgtcgccgtgtcccatatcgaccggcttggctcaggctgttgaagcggccacagagcacccagcacgtgctccgcttcgtcctgccaaccgtaaccagatatctgagtccatatgaggtcatgctcatgctccatgctatgaggatctttggcggaaacaagccatatgcgaagcaggttgaaatacgctctgatggcatacagcttttccgggcggtcggttttagggtcgcgacgagaaacccagacgccaaacgcgacccagatctcagaggtattcccgagaagcgttccgtttagaccataccgggctagcttctcatagaggtcgatgatgagaccagcgaacatccacgcgtcctcgtccgtggcggaggcagtagcatcctcgctccaaggcgcaaagtaaagaaatttgagcggcacatcatacgccccattgttcagaagcatcttggtcgcggacttggaagccgtagtgcaggatcgtagcacacggattgccaacgacgagatggcctcttcggctcttccatcgggagttctacggtcgccagtgggcctcggccattcaagcctgctcagaaagtttcgtagcaatcgtggcacattattggccacttcatcggaagcttgtaccgagctgatcgacgttatgaggaggattccgatgagctgatatatcgaggtcaaggacaagttcgagaagcggatgggctgatccagcattcctgatatccggtctagtagcgcatgcagggggagcagtttgacccaggttgtcaaaggggaggtccgttccggttctctcgtcacatcttcgtcggtaaagccctttccctcgatcacggatctagcaccgctgcccatcgacgcatagagagcggagacggcttcacggatgacgcccgcgttcttctccgccgaacagagtaccccgacgatcacgtcgatacctagcttcagcaatttgccatcatcgagctctttccggatagtctcggtatatgattcccgttggctgagaatcttgccgaggacgccgagcatcatcgtcctctgtggtagaaacgtgctggcgcatagctggatgacctcttcaacagtatagcccgctcgtccagactcgtcgccatggtgatgaagtcccttgttcaccgccatctcctctgactgctccactgtcaagggcttcccggcgaggtcgaagcgagtctggggaggcgatgatgatgatcccgcaccgcgggaaggtccaggtcgattttctgcctggatccactcgagctcagcggggttggcagcttggttagggaaataacgctgatgtatgtagctcggagagagctcgtcgagaggcgtctctcgctccaaggtggaagggggtaaaggcgcgggatcgtccacgaatcttgctttgggttgaacgtcttggaaagagggatatcaacatatgatgactggaattaagcacgcagtacagctcacctcgatgctttggcgcaggctctgtggacgatccaagagtgtttcgagcgttatccaatgtctgggtccatggttgctctccactgttgtcatccagctcggattccggctcaacgaccgcttcgggacgcagctcctccttcaagccagaggacatggcggctttcttctcggctctcgaccgcaacatggccaatagatcaggcgagatcatggattcgagttcacccaactcgtgatcccgctccgacctggacatgctcgcaattttagcgtcattctcgtcctgacagtccttgagcaggtcttgcgtcgatctgcccacggcctccctttcaccaaagtccggtccgctcctcttcagaacctcgcttgtacttcgcactacaggaggctcattggcatatggtcgggctgaagggcctgctgtagcagttcctctggctcgcttgaattgggatatccgttgagaacgatgctgaactttggggaacccattttgcgacggtgtaggcgctgctggtggcgcgttcgaagacgatttggatctttcggtaacttcctttaccagagacatgatgacagaggtgtttgatagtctagaccctttatgatcaatgatcgaagtcagctacaagttctaggcattccgtcaaatcagaaagagttgtaacgagatatgatcgatatgagcgatatgaacgattcatctcgaaatctcggcgaaggacgacctccacctgggggaaggtctccttacgtaagcaggaaatggaaaggtactggcaccatgtatgctaatgcgaacgaatcgatgctacagttcatctctatgtctattcgatcgagtcttggcgaatactgcctcgagggctgggaagcagaacacgggtcagctccagttcagaaaggttgagccgagactcgggctctgctcaccgtctcttgttgaatcggatacgctcgatggcatgacgaccgagtactcgacgtaaaggtctccgtggggcagatgagcgtgagcaggcatctacaaggcgtcgaagtgatgtcagaaaggcggtttacaacgctcaaagcaagagacccaatacccaccccttcccctttgatcacatcaacgtgacccggttgagtcgttccgggccgaacgatcctcacggtcttgccatccagatgcgtcacgttcctctcgaaacccaacaaggcctcgtcgaccccgatgatttccctcctgtacaacccggaatccttgcgcctccactcgtcgtccgtacgagcgtagaccttgacgagaacgtcccccgggatgtcccaatcggggctctcatctgcctccccgtcgaataacatctcgaacccttcgtgtgcgccgggcgggaggtaaaagctgagattgttctccccctggacgaccttttgaccgcggcagtggggacagggacgagcgaccgtcttgccctttccggcacacgtgttacaggtcgcttgcatctgcgtgaacatcccagggaagatctgagccttttggatggtcactcccgaacctcgacaggtcttgcaggtatgtatatcagagtcggaagccgctccagagcctcggcagtggtcgcacaaggtcttgcgaggtatgctgaactgcaacgtcactctttaggtttagccggcgatgacgaggtctgaacgtgatacttttggcctactcacctcttcataattgccaacgaacatgtgcttgaggtcgacctccatcttgaattgcatgtccggcccgcgccgctcctgctgtcctcggcctccgcccccgaagaactggctgaacatgtcaaagggattatgatggcctcctcctcggcttccctgctgctcgtgctgcttcagaccctcgtgtccataacgatcatagatcgaccgcttgtcttcgtctgacaagacttcgtacgcctcggagatggagatgaacttttcctcggcatcaggggctgagttcttgtccggatggtatttccgcgaaagcttgcggtaggcctttttgatctcggattcaccggccgtccgtgatactatgtccaggagtccgcaaggttagattccaatcggatggatggccggtcattggaacaggttgctcacctcctaatgtcttgtaatagtcctgttgagcgagcacacaagccagacttgccaagaggagcaggcatatccgcaagattgtcgtcgagtgcgacattttatcgtccagcgctacgctatcgagccgttgagagcgggtcctgccgactttcttcgatcgaacgatataccgtggatggaacgctaggcaacaccttcaaaagacgatagtaagcggccgtacgagtgtgattaccccaggtttgcggatcacctatggatccctggtactcgacgatgtggaagccggacgatgtgaatgatatgatccctcaggcgacgcggatgcaaattctctcgagaaggatccgtcggaagctaatggggaggacgttcaagggaaatgattctgactagaaccagaaaagggaatcgaccaactttattgtcgacggtcctgtaagctatacgtcgcccctcacatcagtctgagtgaccagatttaaacgtatcgagcaactcttgactatcggaagtcgaatcgatttccagctaccgatcgagatcatttacggactggatgctccttcgtggcatccgaacatcaccaagacccactacactcgtttctccgctctcggtacccctctcatcacttcgtcccttgctagcatctcagctttatcagattaaatctgtacaccgacccatcacacgttcacactcctgcatcatggcccaagctgctggaaccaaggtgactcagccggaatggcaaatcccaaaacctcttgtcgaggaacccgttctcaaggtgtacaattcgttgacccgcaaaaaggtcagtccattgaagaattgcgatgatttcttcctgcgatatcccatgcctaaagatttcctcgttcggcaacatcgcaggacccattcattcctctccggggccgtcaagtggactggtataactgtgggcctaccgtctatgactcggcgcatatgggtcatgcacgaaactacttgacccaggatatcgtcaggagggtcttgcgggactactttgcgtacgacgtcaactttgttcagaacgtgactgatctcgacgacaaggtgggtagacgatgaggacggcgaggaaattgacttggcgcagacgagttgatgatccatggggtattttcccttttcctgcgccgtttagatcatcgttagggcgagggaacagcatcttctcaaagcctaccgggattccaaccctactctctccgactctctcaaaggagacatccgggccgctttcagcgcctacctcgcctcgaaactgttgaaaacgctcaaccctgccgacgtccctgaagaggcacaaggagagactgagcttcaggtcctggataggctcgtcaagaaagatcagaccgacgcgacttgggccaaggagatgagagagaaggaggaaaagtttgggttgatcttgggtagtctggtgagtgccgtctgttgcgccagagggacgatttctgcttgattactgatatcggaaaagggaactcgttagcaatcggccaagtcggcgattgagaacgccaaggactccagccaggctatcgacatggcgaaggatgtcctgtcttggtggctcgacaagaaggcaagtcgagtgagatattctacttgactacgtagctctttctgaccaagaggtaccatcgtcccactgttctacaggacggtcacaccgtcactgaccctgccattttccgagctctcgctgctcactgggaagactcgttcaactcagacatgcgcaaactccgaattttgcctgccgacacggtcacacgggtctctgaatacgtccccgagatcgtcagtttcgtggaaaaaatcatcgagaacgggttcgcctatgtgcaagaaggcaacgtttggttcgatgtcggcgcgttcgagggcgccaagaatggaaagggcaaggaaaaggaggaggatttcgagcatgtctatgccaagttggcaccttggagcaaggggaacagggaactattggaagagggagaaggtgaaccgccgcgtcaacatcttatccaaagtggtcgagacgctaaccttgtttcccgatcaaaggctcgctgacaaccggcaagacaaaacgatcctcggctgatttcgctctctggaaatcctgcaaacctggcgagcctacctgggcttcaccttggggacctggtcgacctggatggcacatcgagtgctccgtgatggccagtgaggttctcggtcgacggatggacatccactcgggcggtgtggacttgatgttcccccatcatgacaacgagatcgcgcagtccgaggtcggtatcaatgcacccccgctcaggaactgaagctgatctgctgatgtttgtttgagcaggcttaccacgattgcaggcaatgggtcaactactttttgcacaccggtcacttgcacattcaaggtctgaaaatgagcaagtcgctcaagaactttatcacaatagaggttagtgacgcggcagagataagctcgacaagcggaaaagcggctgacgtccaatacgtgcggtttcctggcgacaggatgcgcttcaaacctggagcccaagacagcttcgtctggctttcatgatgcagacgtggagttccaagatggacctgacagatggcacgcggacagggatggagaatattgaggagactttcaatgtgagtctcaagctgatcttggatattccaagacctagtgctgatcttcaactgtcataaacagaacttcttcagaaaagtgaaagccaaggtcgccgactttgaggacagcctggcgccgtctgatgggtatcactaccatgaagatctcgaaaagcggcttttggaagagtaagccaaggggtttcctcgatgaaaggagtgccgaattgactcaggatgtccttctcagcctgcataaagctcagcacaacctacgggttgcactttgcgactcgtttaacacgcctgaagcgctcaccgtgctgacagacctggtcagctctgccaacgtctacctgcaaacgcggccgagaccccgtaacatcgagcctgtcaagtcagttgctcagtggatcaccaggatgctcaagatgttcgggctcggtgagggcgctgcgatccaccaggatggtgcgattggttggggagagacgatgaaggccggccaagaggaagaagcgactatcgacgtaagtaccttcaagcgtgatgacgaaacgccaaattcttgctgacggccacgcaacagcgagaggccattctcatgccgtacctgagggcactttcgactttccgagatgacatccggaaactggctctcggaggcgcgaccggcaaggagttcttggagctctgtgatcgtatgcgagacaacgaattggtcgatctcggtgtcgccttggatgatcaagagggtgagcaggtgtctttccttgctggtttcaagcaatctgatatggcttgaatttgtagacgggaaagcattggtaaaattggctcccgccgaggatctccgtcgagcaagagatgagaaaaaggcggccattgaggccaagattgcgcgcaaggccgccgtcgccgctgccgaggaagagaagcgactcgccaagctggaaaagtctaaaatttcccctctggagatgttcaggccccctcatgtcgaccaaggggtttatacggcgtgggacgagaatgggttgccaacgaaagacgacaagggcgaagatctgactaaaggcaaggggaagaagcttaagaaggagtgggacgcccaggtcaaagcacatgaagaatggaagaagatcgtgggtacaggcggtgtagtagagggaagcctgtgaggcgatgatcgaacgacaacaagaatacaggttgagagctgtagcctctagaaatgcagcacctcgggaccgcatcatccctggatctttcggatcttcttgtgcttttcgatcctttcgatgtttccgactctctcgatcttttccaacccttcaaagaccgagcttccgtgtgtctcgatcttggccgctgaatacctttgaatgacctcggatccatctaccctctcaaccttttccgtctcctcgataatctcctctcgcgcgggctcctttttcgctgtttctttggattcctttttgacctggagttgcagttcttggagagattgcgccactttctcaattgcgctcgagtcggacgatactgtactggccctgttagatccaggcattatcgatcgagtaagtcgtagcgctcacctgtcggtgagatgtatcgataacatcttgagatgtactcgtaagatccattgctagatgacaagaatttgtcagaccgtcaaaaggaattgaagaggcggtagcgcgtacggatgggaccagcgaacggtgatcaaaatctttccctcataatgttggagcacgactgtgccgcctattgattactgtgtcagcgactactgacctctgtatgggaaatggacggttagtgatatatctaccttccccatctgttacccttgccagttcaaaggcctgatgtttgacgcccttttcgtgtttcggagcgacttccggctcaatgctttttgcgcgcttgcactcctgcttggcttccggaacgatctcaaggataccttcaacaagatcagcgaaacccatttgggtttttagcgtcccacacatctttcccttgttcatgctggaattagttcgaagtgaattggtgcaggaagatgctgcgaagccattcttctcgataatcagtggaatacgtccctgcccacgcctatatatatgtttcggtgtaccggtgtatgagtataacgtctgcgtgatttctgtcagcatcggccgcgcgaagcgtgatgagattgattgtgcatttgtggatcccatcgaccgataaaacccccattatattggaagacagattgggtcgtgcgacctcaacgtctttggcggatcgtttgcaaatacatagcaatacgaggtgtcctttgacaacggaatattccaaaagagggcaaaaattgttgtacgcaggatccatctgcgtcaacatcgcttacggcgtgctcaaaggagggtcgaccctctccaactcgacctctttatcgtttttgaagttttccctgacgctaagatacgcttcatccatctactcgaatgtattgcagctaatcacagtcagatgcggaaaccctgtagtggccgtattgaacgggcccaaaggtactcatgcgtatggataagtgcaaaggattttcaacggcggccgggccgcgatgaaccccgatgacgatgctcccacctggttgaccgtccaatatctccactactcctgctttgccgacgaaccaactcgatgcatactccggaccccggatgaagactcggatgtcaaagactccgacgatgaataccaatacaaccatcctttgcaccgtcaggaccaggtgaagatccaaggggtttgcaaggtaacagaagaactcatccgggagaccctcacgacgtacaacaaggaggccatcgactggataaaggatcaccttcactgtgaatcacatgctcggtgatcccctgagccgcgagccggtatgcacacaatcgctcttctggcagtaataacacagaagctaggcaggccgcttggccgctcatccccatgcctctgagatctgccaaggcattgatgacgtgatgaggacattgactgcgcccgataaaatcacgccagttgggctggttctgtacaacactttccaattaggctttcagctctgaattttggccaccgaatcgacgatcttgcagaacgcttcagtggtcgatgtctcccttctcgatgccgttgtgacttagtcaggataggatgcaagagaaagtgtacggatgccgctatcgtgcttcgatgcgcccacctgggtctcctggctttcgcaatggtggacttgtaatggaacaggaggtgtcaagagatcactctcacagggttacatcttttatccaggagacaaccgtcctttagcgttatttgttggggaacgactagaatgcgagcgcgcggaagcggataaaatgaataagtgaaacgccgctgccgtttgccccgcttggagcgtgacatgtcgattggtcgaaaagcgggcatggaatctcatgttttcatagcatgaaggcggtcgtgggacaaacagaccaagggcacgtaagctggcccagatgaggagtgaagttgacgagcagggcgtattgcctttgacttcgctatcgcagagcgacttgttgtcgaaggaagcgtctagtcgcgtcgcttgttctgaggacaattctgagcgggataagtctcgactctaccatccgcataagtcatcttcgcggatgcctcgtctgttgggctggcgttatcagtatgttgttcctccatatggaagaggaacgcggtcagtgtctacataccgcctcgtttcccgttgttccagtagtggcggaccggatgacagtactcgtaggatctatcactggtttggcgtaccgaccagcaaaaggatggtttgctataccagtagcttcatcgcgcctacggatgtgctcgatagacgatgattgtacctggctgattaccagcgccaccataatctctgacctgttcgcggacgcctgaattgaataatcggtgttgataagacgcttttcatatgttgacccggaaggatctactcgccgttctcatctttgctcttgacaatattatcccaatacctttcatatcctttgcctcctggaccttccacatagatcgtaggggggcgaaaagcttccccggctggacggtcgattgttttcgtgattctatgagtgattttggggctctgaccgccaaattcctcgagcagacgggcaacgagctgtcctgaaaggagtttcatattgtgagaggaaaattctatcgaattcggtggggttgaacccaggcgaggtggtaatcgatttaagtagggggtctggcctcaaagtgattttcttcctatacctatatacatctagtaacacagacgcttcttgcttctcagctcctcaggtcttgaaacgagtctattgtgcaaatcgacctgaaactggtattgttttcttcgactcggctgatcatctgatctgttctccgtcagattatctatgacgcctgacgccacgaaaacgacaagaacaacagaacaacaacgatacaacaataaaatggtatcaaagggtcttgatgggcacgatgggtttcacgatgattgatgaggacgaccgacgactggggtggatcgttgggtggcgttgcgcggtaaccggtcttttgtgtgatgtgatgatgatgacgagccacttggactgatgaaagtgatcagtttatcaaagcgatcagctgaattgtaaggctcggcaaagcgatcaacggaagcttagtgattagtgaattagtgattttgtttttttgatcagctggatctgtaagatctccacgtcgagcgatcgcgaaaatgattgtttgcttcgaaatcatacatgcacacagctcgcagctggaggtcgaatagtctcgccatctcatatcaaaaaataaatcggtcaccctcccatgattcgtattgtataagtcgcccctcggccaagtagttacgtgtaggccaggtgcaccagactcatctactcactttgccagtcctttccggtccctggggagtagtaatcgagagagtagcttcgtcccttctccgaggcctaactactcttgaggggccaggacctcgtgagatccatcgaagagttctcgaggcactctttccggctaccgactgcagctggcttgatcgttcgctcaagttcaagccacgccgtcagaggagatcatctgtgagtaacgagtacaagcgttcacgatgttgccttcatcactgactcgatttacatgactcggagtcctgtctggaatagggatctgtaaccgagtcttttcttcacgagactgaaattgtcttacgttcggacgattctctgttgcctcaaaagcaaagtgaaggcgcatcccgccggacttggatcaccacacgcttgtgttcgctagcgacaaaagatcaaccgtcgctaaactatcggtcgaaagtgtccaaccgaaagcagccatgtccgcagtgcctccaagacctcgtctctctggagtagacgaatcccaaaccattttttcgggaagtcacaacaccctctctgtcatagtagtagacggctcggacgattcgcaagcaaccatcgaagactgccctatggatagcgagtgggacggtagttccgacgggcatgacgacggcagtgatgacgacttcctggtgaagaatcccgagaggatggttcagtgagacagatcattgagtgactcgaaagttatcatgcctaatccttctgtcgttgaacttcttcaggcacaatatgcaaccggtccgcaggtcgtctcgacgcaaacctccccccatcgaatctagagtctcgaaaagtcaagcgtacatggatcgtcactaccagaacgtcacaaagatcgcagtcaaccgagccaagaggatcagtcgaatgaccgctcccttaagctttcgtcctggtgaggatgggcgcaaggtcgaccagcccatccaggtccaagcagtccatccggcgatgccaccaagcccccgcggtcattgcgctacactaacgtcaggtcgaacaaagcctaccaagattgggaaaacgtcgatcattccaacaacctactccactccctccaataacgtaccaacggtcacatctgatacctctatcaatcaaccccgtcacaagaaaactgtcggctttgtcgacgagacaccgagcggaaggtccataccggacaaactcaagccgctcaacagcaggctaccaatgactgctctcggtaacgtcagcttcaaaccttctggcccatctaccgttagagtctccagcaagccatcactcccgtcccgtacgaacgatcgattcaacgtatccatgccaaccggcgtcaatgtttccgtcaccgaaccatccgtctcccttcccgagtatctcaaagtctcgcggcctcgttggcctaccatacattattcagagtcgggggaaaagggagcgaggcttcctgttcgttttcatgtcgagcgtatctcccagctgagaccggtgccggaaatccgacagcacgacaaaatgaccgcgctacgtggcgaggcctataccccggagtccccttgcgccgccctcacttcctgtccaccatcaagtaggccggccttgcaaggctacaagtatcatccaggtcaagccaatctacctggtgtgcaagatgaatttcataactcagagctgtccccaccagcagtctttgccgcaagaccgccacaaaacagaccgtttggcaagcgccccctcccctcgccggaccagccacaggatgctgaatcacgtgaagatactttccagcaacgttttcggtggcatacgagtacccagatctgaagaagcttccgcttatgccggcaaaaaacgcgaccggccgttatcgcagcggaatgaaaagcggctcgtgaactcaaaatgcacggctgcacggatggtcatcgtatccgacggggcggaggggacaaggagcgggacgggtcgagcctcgttcagagtttctagtcggatgacgacttgggccgatgaagtgggccgttcagttcgtcagcaacgatcgataccagagattggctccaacagattgcaagcgaactttccacgagaacctgtatcttccagcagaccgcatgtaatggtctcgaacgttctcggtaaccgcaatacgaaatgacgcatgagtctgaagccagccgattcggcgcagcagtttccttatcaaggcgagcctgaaacgtttcttgtcgcggggttagtactgggatacgaaaacgcatgccaacgtggcgctacggcagagctggtgccggcggtgcatgccgtaggtttgctagttctcgcccgagggggcgtgatcacgctctccgttcctgacgcgtttccaaccgagaaagcggtcgacggcgagatcgcgaggatatttttgtacgattctgaccgcgatgacttgcgttggtccgctccgaaccgtctgctcacaacagccgggatcgagggagacatacttatgcttgggccgtccccgagatgaccagttgttcgagcaacgaggcgacgacttgtgtcatagcattcacaacccccccagcttccggcactgcttcaacctgccctgcggtcaaccccctatctcatcacaatgggctcaaacgtttctgtctccagactgagcaccattggtcctggccaagccttcaacacccagattccccatggaaaactgtcacgatcagcggtcgcggcgttgggcgagttgggctacggtcagaccaaatacgacgacgatcctgctgtcgtcaactttttcgcgaccgccacgcaggccgaggagaaccacaagcgagccgtcgagctgctaaaggagaagaccccaaagaagctgcgcgccgagttccctatcatcgtcaaaccatgtcgagtgactcgaatgatccaacctaccgccatgtgatgaacgagacaccatcaagggatcgcatttgatcaaggatgggacgatctgatcatcgttctgtttgatgatcataaccggcccacatctttgatcgatccgatcaatttaatggcacacgaagcaggaggaaccgacaaaaaatgatgatgatcccgacgatgatgatgatgatggaaaacgaacaaactctcttgatgcgacatgattaacgacaacgtgcgacaacacacgcaaacaaacacgcaaatatccgtgatgaggaagatcacgaagtataccgacgacgacaagaaggacgaatggactcgacgatagagtcaaccttataatcaacccactacactaccgtgacatcgacaagtcgtcactgacagcggaaaagcggtatacgacaacggcaaaggaatggcttgcccggttatcgtcgacacgctttcacaaatggctatcccacatctcagccaggggtttcccctcgatcagctgaagcaggaacccacctatcagatcccacccgttattcccacagacgttgaatgggacgggctccagtacctggatgcactggctttctctgatcaggaatccagcgcgatcgcgtttgctccgaacgctgcccaggctcgagaaacacaacagcctttgatctgggccgacacgccttcgacacctcttgcatccagattaagatgggcatttcgatggaaccactatgacccattcttcggagcaaaggaagctagggcgtcgccggtcgtgcctcaagacgaggtgactaagacttccgaggttcaagctgctcaagagcaagcgtcagcatctccattgtcttcgccagccacgacgatcgaatctagcgatatcatcgagcggatcgaaatcccgagcgcgcaaggccgagcgaaatatacccccccgcatcctctttcccgaaacacacggaccttctcgatcccactcgaacacacggcaatccgtgacggcaccttgcatttgcgggtccgtcagtggcaacgccagtttttacgggtcgtaagtcctgcccattcgtctccggacactaagtaactgactgaccagtccgtatgtttgtagagggtcagtgtgttgcaagcagggaatggaaatgtgtatgcaacgacagcggggcgggaaggggtctcacatccgggtctctcttatagaagagaaggctcatggtctgctcatagaaaaccacgcatgaacctctctgcgcatggcgggatcggcgtgacggacaattttttcttcgacttttgtaaacaaacacatatagatgcgcttcgctcttcgcactactgagaataagatagatgttgaacacggagaaaagtcagctaggcatgtcgacgagtcccttgacaggagcagctctcgaaactggtacacttttcagggcataggcggaagacggcggagcctgcaattcgtaaggcgcaacacatttcgcaagaggctttctttggggtgggtgttcctgtcaccgttacgatggacaaagctttatccagttccagtcgtttctacgaggaatcagaaggaatcgagaccatacagtagaccgagctcctcagtccttcctcctcactgatagacgggctttcgcatggtacattaacagatatacagtctatataggatggacaggcaattatgagatacactctcgaagcagagaaacgggtgatgacaagagacacgtgatcgaacggtctacttgtccagcttgatgtcgtccctgcatcgcaatgagtgtctcagcgactgccataaacggtttgcgaatccagagactcacctggcgttcaacacgctgaggtatacagtccatgcgattccgcatgtcgattggaactgagaggacgggccgatcagcgaaaattctgcaaccccgcctcgttttcgtgcggtgagcacttacaggtacccggtaactgatatcaggggatatgtgcagaacagttcgtcatcagctctgctcgatttattatggtgaagtcgaagcttacggcaggggcatcaacctgaagttgacggcttgcacgagcggccagaccttccagttggcaattagggcagctatagatcgcgagtagtgaaaatttgatcttgatcaaacaattggttcaatactgaaaagtgtttgctatactcacgttggtacatctacgccattgagagattgagaatcagcaagcatgtggtagacaattcggacatggctttttcgctcgacatacgtcactgaatttgtccttcactccgttggtatcgcgtccctccatgtatcccatcgctgccacgaataacgcgagctacaaccgaatcgagagaggtgatgagctgctggccatgtcaagaagatcccgagcagtaaactcactccgaacggagctctgtacgatacacccgaccgactcgattcagcgtcgaagggacctctttagtagccgggacatgaaaacttacagcacgaattgatccataaacactctcttggctgtctgtacgcccgtgctccctccgggaaccttgagcggtatcctcctctcgagaaatttcatccatactctgtatcacgatctcgatcagccgggatcggcatacggatccgagccaagcgtactgaccctacgagcggtccgatagccactccaaaggcggcaaatcggagcgtcctgtacggatcatacgatggcgctgggggttggaactcgggggtgtcgggatggggaacctcgggccgggcgagaaggatctgcgatgtttgtgcctgttcatatcggagtgtttgaacaagctcgtcagctaacgaggcatctatcgatcgtagcacaggtacgcacaacaatatcaccaagactgttgagcgctccgttcgtgatcatcaaagtcggtacgggtctcctctcaaagttgctaaatgtcgtcgaatttgtcagtcgacggtcaatatcgatgtgacgtcagatccgtctcttacgaggtatagaccttggcgaaagcgccgattagacctggggcgggcatattgggctaatggcagaccacttgattatgatgctttcagacagctcagacgatacgaacaagatgcaaggtgcaagctcttgaccgaataaatatacccaacacaccaacattggccaagaactacgaatctcgggatcggccatttccctgttatcgcgcttcggcgacgcgaaaatcgaaatcgagaaaacgtcatcatccagtcgcaagtcgtcactcgatacatgacatcagtcaaggatatgatgaaacgtgatcatgctgatgctggtacgacatgctgtttacaacgctcgtgagggtagcttggcgaacccgatcactcgtcctcatcagtctcatactcgctatcttcgtcctccccagcaggtcgatcgctcgatcggtccacctcaacgatgagggacccgcctccctggacgataatgtcccacgctccgctctcaccgagcgtgacctgttttctcggataactggtaaacagcttgaccataggtacttggacgtccgacgagccggccacggtggcggtataagggtcgacaaacccggatggaggtgcggccggatcttgatccagcgtgtcactggacccggacgggaggagcaagctctctgcccatcgagagatgtcgaccaggctctcgtcgtccttcctgaaaactttgatattcctgacttgtccgtttccctgaggaagcctcagctggatccggacggcctgaccagccttgacatcctctacggggggttcgaccatctccccaagtcgtctcctctggtaccgtctccacgacgtcaagtcgtccctcatcttcttctcgcgagcctccttgtcctgtttgtcccgctcggctcgttcccgcttttcaatctcctccttttccagccgttcccgttcctcccgttcccgtctggacgccatgatccgttcgttatccctctttgcggattctgcggctcgacgatcctgatcctccctgaccctacgagactcttcgagcgcccgtcgttccctctttacccgggcgaggaagggttgactacgcgggatgagggtagagtccagcaaatgcaggatcgagggcaaggacgtcgtggtcgatggagaacccgagatggtagagaggatggtaagcttggcgttcgaaaccgaggcggtcgctgtagaccccgtcgatggcggaagcaaggaaaagaaggtcaaggacgggtacgtggtgatctggagcgtttgcgccactgtggtcagggtatcaaagagtcagactcgacgtcaatgccgcagggtcgaccctacaccacggttgtcttctcatctcaccttgataggcctcgcgatcccgtacatccccagcccagacggcgatattcttctccctaaagacccgccccagttcttcattcaatagcacctcgcgcttgaacacctcgtcatcctcgtgctccccacaacagaggatgaccacgcccaacttcgggtcggacctgatcccacgtaaaaattccttgtagggttcggtagagaaatcgggcagtcggtcgaggtctacaggggaaggggtgtagtcctccctaagagattggatgaagggtttaggccgagtcgaattgggttgaatgcggccttgggaggaaggtgggattaggagtctgggaaggatgctcaggatggaattggggatgatggatctggctacagttcgggtgatgtatacgcgagggatgagctgttgatctgtaccgtaacgccgctgagaagaggtctttacctagcatgtaccaaaacccgatcaagatcctcaggacgaatctgattggtaagaatagaccgtacaccgtgcccaagccgagccgggcgacgatcggggtggtctgatttcggttgttgggaggtgagggcgggtacgagctggacgaggtggttcgtcgtggtgatgccggtctggccggggacagctgacgtcgatgaggtgttgatggcgtaggagccgagtagtggaggttgatcgctttctgacagacgcactcaagacctatcagattcttgcaacgaggagtagacgagaccggatcgaatcgaatcgaaagaaaccacgcacctctatgttccagtctgatgcgcggagaagctcttcacagcttctccgaccgagatccccatccgcggccgtgatagcgaccatctggtcgacgacctcgttccttgcttccgagtccatggtattgctctgtcgtgtgcgtgatccgtacgaggtgtttcctgtaatctccggggtctatcagttctacgtgtagtttgtaaagtgggtagacccgggtgtacccctgcttgctcgcttgcttgggacccccattgtcggtcatctgcgggggggttgacgtggagttttgattaaaagatgacgtgtcaatttcatgttatacccttactttacttattttggtcattccatttaattgataaagatcgaccgggtgacgccgaagcctggatcgaggatgagtttgtggatgaaacatgattttgttcacaaaccaattcttgaccaaacatcctcgacctctaccgggcggacactcgatcacatgtagtcggcctcgtcatgcttgcttcacgtcctcgattgccagaatggcgaatacttcagagaaagcttccgttgatgggcgagtaagcaccatacgtcgtaacacagccgcccgcgagctgatcctgccaaccatcaaattcgaatcgattttcccgcctacaggagcgtatacgatcttggtcgtcagctatgtagcgtttgtcatctatgtcgagggggagatgttgctggtgcagcaccgtaatggacagttcatgaggcagtgagtgcagagccgatagacgacgacatgtggtatttacgaaacactgagtatccaccttgcctcgtactcgcttcacaatcaggttcatctgccataacctcctcttcggcctgactacctattccctcttcctcacgtcgaatcgacatccgggatctcctgtcagatcgtattcacacgatgcaaacggtccggacgagtataccactcagtctggaatgagccaggacgagcgagacgccatcgaggccgatttcagggggatcagtctggccgaatggaaagcctcgagaccgcctatatccacgaccgcgtctcctcggtacatcaaccactcgtcagaggaccagtacgagaggcaagacctcgacctcgatgaagacgatgtcccgctcgtcaacctctttcataacaagcccacctctggcgcggtgagaggagaggaaacgcatgcaatggacccaaggtcgatgttgaccgtcaaggggagctcgggaggggtcaggtggtgcaggaaatgcaacgcggtcaagccggacaggtgtcatcattgtagcacctgcgggacctgcgtgttgatgatgggtgcgttggctttgtccacaaggtcccgcaatgtacctggcctctcctgcgtatggacatcgaactgatcagcttttatctcgttatatgacgagcagatcaccattgcgtctgggtggcgggatgtatcggctacaggaacaagaagacgttcatcttgttcctcgtctacgccgccctttacgcagcgtactcggcactcgaggctgggaaagtgtgtgtcgactttttcggagacccctcaggaatgggtgatgtgagtgatccatcgaaattcctgaatctcagccaaagctatggctgacaatgtacggggaacgctcgtcgttcgttcatgactaacaggacgaacaagagatcgagatcaaacccgtcatctggatcctcctcaccctgtgcggcttcgtcttctttctcacccttgcgcctttcgccgtctttcatctgtacctcgtcacgcagaacttaaccagcctcgaacatatgcgtccggcctttcccaacatcaagcttgcggatcaagagattctcccccccgacgctcatacgagccccgggtatcccgctcaaagaccgagtctagaggtcaggcgcgatcggggatggaggccggatcacatgctcaatcgagatgagaggaggcgggcgagacggatagccgagtctaataacccttacgacctcggatggaggcgtaacgtgctccaggtctttgatccagacgacgaggggccgacttggagatggttctggccggggggccggggtggatcgtgagtcccacctcaaaagggtcttgcgacagaagctcgacgtgaccacaagcgctgacgttctggtaaggaattatcaggtcggatccggagggaggtcaggtatttacctattcaaaacagacgttggagaggttgcgggaagagacggctcgattacgtctcggacgggattatcatgcacgtgtacaagacgtatgatgatgactaggttctgcttgagcgactctgggtagccacgggctcttctccgcgaaaatgtaaagaagatggatcatgcgttgcgggtcaccgattcacgcacggacgtctcattcgaccgctttgaaatcacgtcggagtaagccagtctcatgtggtcaagactatatgagactaagaagggggcagaccggggatgacgtccctgttggaagataaacgtgatacctcacgcgtggacgtcgctggtactaatgatcaggaggcgtcgatggcttcctttgtcaaagatcagcgtcattcatcgcaatacactgggaagaaagggaacaggccaccgaagggatctgcaatcagtcatgaatcaggccggataaaggtgcaggcaaccttgtgaccgatttttgggacctatcgagcccaagagaagacatcgcgaaagtcatctgctcaagatctagttgtcggctttgcaagcaggaatgaccagccttagcgcacatctcacggaacagggacgctcgacaagcggattcccaaccgcaaaccgactgcaggccccaaaacaaaggcaacacccctcacgtctgcccggacctctttggttactcgctttcgctccccccttcgatattaggaggccgcaagaagcgcttcggcacccgtacaccctgtacgtcttggggatcattgcgggtctcatagccgggacatgtacggtcgcttttgatgtcctctatggatactggacgaccggcatcactacgtcgcaagcttctccggacgcgatttacgagagagctcgagtcagcggttggatcatggcagtcgtaggattcgtcgcagtcggcagtttcggatcgtttctggctctttgtgagtgtacatgcgcttgtctgggctacatcgtctaggatgcgcaaattcaatcttgcaactgtaggttccgccgcagggctgcgattgacagacgagcttcggaccgtctactttcagtcaattctttcgcaagacaccaccttttccgatcttgtaggggctggagaagtggctacgcggtcaaataaagacatggatattattcgcgccgtgtctggcgagagattcgggtttgtcgtcatgaattcggcggtcatcgtgggggtacgtaaaaccattcgcgtggatccttgccaacctgaatttggattcgttactcctcgcttagtctctcgtctccacgttcgcaatgtcgccgaaacttggtggaatcgtattttccctcattccgttcacggcaatcttattgggtgctattggctggtggagcaagaagaagaccgcggccgccgacgagatcgaaggttcagcctcctcctccatcgaacaactcatttcgtgtcctcgtgttgtgcaatcattcgcgatcagcaaacgtcttctggacaggctggagcgacgagcttttcaaccattgcgcaagttggggctgtaccgagcgcttggaaacagcctggagcaatctgctgcattttttgtggtttttctgacatactctttggctttctgggcgggaggtctcgtggtcgccgaaggggtacccacaggcaatgtccttacggtacgtgagcgtttaatgatctctacaaaggcgctaatcctcgtggtgggcagtacaggcggtctttaacattgtcaaccttctgttcaccttggctgtcattgttccacatttgactgccattcgggaggcaatttctacgctcaacgtcgttcgttaccaaattgaacgtcggcctatgatagacatcaccgatgatacggggatgatgctagccaattccgaccattggggaccttctttcaggctacgaggcgtaaccttcgcttatcccactcgtccaagcgcagcggtactggagattgtcagtattgaatttccgtcgagcaagttcactgcgatcgtgggcgcctctggatgcggcaacagttcgatagtctcgctattgatgcgagaatatgaccccagtcacaatcaaaaaggagtgatttagctatcaagaaccatatccaagacgtctcatacggtccaacagaccaggtcgattctctcgactgtaagcaagccgtggtcgacgcggcccatgctcttgtcccaggatccggctcggtcgaatttacaggtcacgatgtccgtgatttgaacctacgctggcttagacgtcaaatatcagtagtcaaacaggacccccagttgttcagcggtaccgttttcgagaatgtggccgatggtctgaacggaacgttactagaatatcacgcccctactgcgagagaacctcgtcggcagtcagccgacaccagcagagagatccgtgaaagatgtcgagaagcgttgatcaaggctgaagcatgggagtttgtccaagagctccccgaaggcatggataccgtgatcacaggcggttgcacgggggtactgtctgaaggtcaagtccaaaggatcgctttggctcgggcactggtacgtcagcctagatgcctcattctggatgaagcgacatcagctctcgccactgatacggaaagtcaaattcaagagatgctgcatcgggagcaaaaggagacaggaatgaccctgattgtgatcgctcatcgattatcgacgatcgtacatgccgacaacatcatcgtcatggaagaagggaaagtcagcagtcagggaacgtatgcagaactaatcaaacccggtgacctagatccaactttccgccagatggtcgaatggaatcgacaggcacagtccgaagggtcagatctgaagggcaagatcccgatccaggatagcgtaacttgcgcatctccctcttcacataccaatctgacacctttgtccgaagactcttggctcttgggtccgccactaaggagagcgagatctacgttcgcatggaaaaagtggctgctcatgacgggcacgcttgcatcggctttggggggtgccttatttgccgttcaagggtggctgaccggcggcgcagtcggagctctgtccatcgatactgatcgggatgagatgcgatcgcaaactgaccggtgggccttgtggttcttgatcgtcgccataattggtttgactatcttcttcacggctggaatcgctctggaatgggccggagcacaaatcagagccagactgacaaaggagtctgaccgggcgattttgcgccaggacatcacctttttcgagagttcggctggaggggtcaggaacttgacgtctggaatttccgagtttccctgcacagtcggctcgactataggtgtcgtgtggatgcaaatcttggtggctcttggaaacttgttcgcctcgttcgttctcggcttcgtgctgtcgtggcgcatcgcgatctttggcttcaccgtgatcgcggtctgtgtcgcgtttggctacctgaatttcacttggctggaacgcttcgaggaacttttaagcaaggaaggggaagacagaaccgactatatcaacgagtcggtcaattctatccgtacaatcgcagcgctcacacgcgaagctgagaccatgaggcgatttcgtggtgcggttccacgttctgaggcgaagcaccgagcactgataatcggagctgtaggatatggcgtcaccgagggggccatcctcttgttcgctgccttggtattctggtggggcggacgtttgctatcacaagaccgtgtcgtgagtagtctaccggtcaagtttggatcgcgaagacaagcctgatattttcacgaggtcagtctgtgcacgagctgttcgccacatctgaggccatccagctggctgcgatcaattgtgggcgaattctgacctttatgggggatgtgagcaggacctcgaatgctctgcgttccatccaggtagattttaccgaattgcacatctttacctgcacgttgttgtgctcacgaaggaaatgtttatagcgatggttggacttgcgcctatcccgtgactgggcgaatgggaacaaggacgagtatcctgctaattggaggcctcgtagcaatcacattgttctgtaagttggagctagacgatcatactgccaagccttattgaccttgcatactttgaagcaatcatgtcgagctgcgatatccgactcgcccggacgcaatcgctctgcacgacatcaatttgaatttccgaccaggtcttacatatgccttctgtgggacctctggatctgggaagagcaggtagtcaaattcgcacatttccctttgcttggaccgaacacgacatgctgagcgtccgatccacgacagcgtcatggcactgctacagcgcttttacgacccgactgctgctcgtatcactatcggaggcgtcgatctacagtccatagaccctgagaccaccaggagtatgatgggctatgtcagtcaagaggcggtactttccgaaggtaccgttcgcttcaatctggcggtgagctatttctgctcagagcattcgcaccctcattgcaaaccagctgatacgttcgtttagcttggcacgcccgacccggacgaggtgacggaaaggcagctaagagaggtctgtgagcaagcatggcaggtcagactactcggtacttgacgatcaaagttgagtttctcggcctgcatcagcatcctagactttatcgtgggattgaaagacggtttcaataccgaactcggattgaaaggcaatcgcctgagcgtcggacagcgacaacgattgtgcatcgctcgtgcattacttcggagacctcagatactcctgctcgacggtagttctctttgctatatgcactcgcccttgggcgagtgcgttgtctgatcatctgtcgctgatctcagaagctacaagtacactggatgttaaaaccgaggcgtctgtacacggtgccatcgagaaaatcgcgggctcgccagccggcccaatcgtgatagcgatcgcacaccgcttgtcgaagatacgaaatacggacgtgatccatgtgatggaccaaggtagagtggtagagacgggcacgcacacggacttgttgcgacaacgagggagatattgggagttggtcgaggcgcaactgtaactgcagggcagattcgcaacgaggccgatactcttttgtaatattttcgaggtgattcatacaaggtattttccagatatcgctagacaacgccgactccggtgaaggccattacaagatgaaaacgaatgtgacggcaaatatgcgccagagcgcaacatactcctcaacggcggcgaccggcggaagcaaatctttctacgaaagttgagcatatccggttgaacctagcctgctaaattatactttgtcgatctccttagcttcaatccgcctagtacgctgtcgcttctttcgttttgttgcttagatatcgatagagaatcacatctcagggatcatggacttgccactccccggagccagtctgaacagctcgataatttcgcaatggcagcagcagcccacgaagcgaccagcttcgcgaaacaggaccaaaatttcattgaactctgccaatccaccagtggctagtggttctggagctagctctcccttgcgtaaggggatttctagaggaggatctccgtctgctgtggagtttgatgctcccaaacctacggccaaagcgaccgaagagaacgaggacaaggaggaacaagcggctgccgcagaaatgaacgctagcttgacggaaccaatgcaagcatcgacgtcaaatgcaggggcaaagcgatcctacaactcttctacccttacccctactcagccgtctaccaagcggacacggtcctcccgaaacgccgagccgtcatcctctcgctcgaacgctcagcaaggctcgtcctccgggatccaatcccgcgaatccctgcttatgaagtatcctccaccgaatctcaagctctcgctactcggaggtctacacgaacagattactcagcttctagaaatggttgcgctgccccttctacatcccgagatctaccgccataccggtgtgcgtgcaccaagaggtgtcttgctccacggtgtaccaggaggaggaaaaaccaggctggtgacctgtctcgccggagagctcgaagtgccattcatctcgatttcggctcccagcttggtgtcgagcctttctggagacacggaaaagcttctacgccagacgtttgacgaggcgaaatcgattgcaccctgcatcttgttccttgacgaggtggacgcgatcacgccaaagcgagagaatgcgcagagggagatggaaaagaggatcgtcgggcaattgctgacatgtctcgatggtgagccgagcgggacttgtccgagatgcccctgctctcgcgttaactttgtgttgttctatagaccttgccgatcatcccgatccggtgattgtacttgccgcgacgaatcggcctgacagtctcgatcctgcactgagacgggcgggtcgattcgatcatgagattgagatgggtgtacctagtgcagaagccagagaagagtatgtcatcagcctcgccgccatctcacaaaagcaaaagtactaacactctattgttccttaggattctcaaggtcctttgttcatcactgaagttggcgggggacatcgactttcatgctctggctcacgcaacaccgggatatgtcggagccgacctgaccgccctcacgggagccgcaggagtggctgctgtaaagcggatcttccaagcaatgggagaaggcaagctcgaactcccggaagacaacaagccggaagaagcgagcatctcggaagtcgttgcaggtcaagatggagaggagagactgggcaaggtcaccgaaggtgtcgaagatatgatggtcattgatgtcgatgcggacgagcataaggcgaccaacgaaaagacgtcgatacaggtcgatgcggcggtgggagagatgacggtccgtcgcccggacggtcctcttcagggactcccagagatcattcagaagacgcctatcgcacacttcttgatcaatcatccgaaggccctgacgactacgcaactatcgcctctacatctcatcccctctgatttcactcaagcgctcaagacggtccagccttcggcgaagcgagagggtttcgctacggtacccgacattacttgggccgatattggagctctgcatggcgtccgagacgagcttcacatggccattgtgcagccgatcaggaggcccgagattttcaaggctgtcggtatcaccgcccccagcggagtactgttgtggggtccacctggatgtggaaagacgttgctagccaaagcggtcgcgaacgagagtcgagcgaactttatcagcgtcaagggacccgagttgctcaacaaggtgggtctatctcatagatcgtcacgtccggaaaggatattaaccagcaatgtttggtcattagtacgtcggagagagtgagagggcggtcaggcaggtctttgttcgagcgagagcgtcatcgccttgcgtcatctttttcgatgagctcgacgctttggtacccaggcgagacgacagcatggtaagctaaaacgtgtgcctgcgtatccactgcggcgagcctgacctgtactcgctgccttcacagtctgaatcgtctgcccgtgttgtcaacacgctcttgaccgaactcgacggtctggacgcccgaaaagcggtctacgtggtcggggctaccaatcgacccgacatgatcgaccccgccatggttcgacccggtcgactggacaagctgttatatgtggacctgcctactccgcaagaacgtgtcgagattctcaagacgcaattggccaagacgccattggcagaaggagcctgggagcaagtcacccagattgtcatgggtgacaagtgcgatgggttcagcggagccgacatgtcgtcgctcgtgcgtgaagccgctacgctcgcgcttcgaggtgcgttggaagctgcaggcgctttcgaaaacgacgacgagtcgatcgacccgagcacgatgcgtcctgctggtgaggccgtcaagacccccgagatcaaggtcaccgtcgagcatttcgccaaggcggcggacaagacgctgcctagtgtcagtcgagagcagaagcgcaaatacgaggcgttgaggaacaagtttgccggattacctgcgaggggtggcaagcgatgggccgaagggaaaggcttggctgcgaatggcggggtcgagcctgtgaccgaaggcaatgaggccggacctgctcagcgtgagaacggaatggatctggctgcctagacgagatctttaatgtatgatcgggcgagagatgacgacttgtgtgtgactttgcgatttctttcattttcaaaacgcgtcgcgtcgcgcttgtcgatcggagaatgacgattttctttgagcttcgagcgatcaatcatctccatcactctaactatacagcatggctatcatcacgacttctatcacaagcactctttgtaccattcagctcacccattctccatatagatgtctcatccggtttctgattgagacagtgcgttgacaaaggtgcatcacctgggatggtgctggggcgatcagcggcgacgtccggagagggtcaagaagtctcggacagcatgacctcgctaaatcgtcgtactgctgcatctcgatcacaagtacctcttgttccatccaatgggttctcttcaaccgaccaccggatctctccgcggaaacgggacaagattcctatgcaagatatcataaacggcaagattggaccgggaaaggctattcaagatgctcgccataaggtttcccccggagcttttccgaacaccgccatcgagatccttgacgatgatgatgaagacgacattctggaagagcagaccacttcgccactcactcctgatcgtactgccaaggatcgcactatgaactgggtcaggtctcccgaacgagggctcaatcgggaatgtccatcctcggctacgaggaaagctcggcgacatctttcctctcctgaagcattgaatgaaacctttggcagatcccaggacattttggaggtctcttcgagcgtggctacggtggcgccggcaccgcgagctgatagacacaagggaagtcggaaggacaatacggccacccgtcagcgctgggagcggaatgccagctctcctgaccaaatcagtaatacgctggcgaacgatcaaagatcctaccgagtcgttggtcgaactcggtctggatatcctcacgatggacaggaacaaatctcgtcgcctccctcggcccgtacttatgacctagaattgggttccctctcctctccgacctcaaaccatctggccgaggtgtccagatctcgacctcttccggacgattactatgacggtatactcgaccccgaggatgacccatctgggtcctacgagcagcctcttatccctaacgaaccgttatccgggtttcatgctgttccggcttcttccccggggcaacaaggctcgagtccacgaggcgagagactcgcatcagccagcataacatcgccgagaagatcgcctcgactacagcgaaatctcgtcctcacgaacgaccagcggagagcaccgatcgaccagccagacgagcctgtcccacgaagacgaccgatgcctcgtcaacctcagccgcgcgtcaatcagattcgccccatcgtcgtagatgatcaacctatccaatctatcgaatcggatgtgtcttcctcgatcatggtccttccggtcgatggagaacgagaggatatcattgctcagtggacacaggaggttgaaccgattgagaccgtcgtcatctcgcccactggaacgcccgaacctcctccagtcagacaaggtgtaacgctggaacctcgcccggaaaagaaggacgacggtagggagaagaggaaatacgatgcgacacccaaccctgatcgaccgatgccaaaaaggcggaaggtaccaaccgttgctatcccacccgtagaggattttcccatgtctatgccttcgacctcgtacacattgcgaggacgagcagacaaggaggatgtggacgccatgctcagcacccaagcgaaagcgatgatggtggggtcgcacctggacgaagaggtggaagagacggcatcggaatccgggctggattgtatcgaggtgttacaggtggagcaggccaagacgccacaactgcagttgcgtgggaaatacgctaccgaatactgttagtctctttgcgtccaccaattgctccactcgagctgaatcccgtctcgatacctcgtttgtcaggcaaaagattcattcatcgcagaaacacgtgcaggtactgttccgaagccatgcccgtcgaaccgacggcgtacctcaccgatctaggcttgaaggtcgccgcgaccaagcgaggatgtgaacaggtcggccgtccgtttcgatgggatcagtatgccgaatattgcgctcgacacaaggccgagaccgagacctttcctctcggcctgctcgcgggatatccagcccaggtcgattttcgctcgcttcgcgatcgcgtgctcgatgatagtgtgatgaaggccatcaccaaaatcatggattaccctcgagatcaccctacttttatgcaatgcgagcgagaaattggcgaacagtatcagtcatggtcggcatcgagctcatccgacaagacactgaggaaactaccaggatagtaagtcggaagctcgggctccaggacgaatgtgcgcagatctgaccttgtcctcagctacggagaactcggattgcgagcgatctccatcgcgctcagtaagatcaccgtccaaggcagtatcctcccaccttacgaaaaaattaaaccactcaagagagaagattggtttcaatacgtcatgatccccgaggtcggacgtatgttgatacaacaagatatgcaagacggcgttgcaataccctggttcctaggtgactcaccttctacgaaagcaaaagaggagcgaaacatgtcctggagagtcctcgagcagagcagggcctatggaagcctgcgctttagcgaagcctcggactttgatacgagcgattccgaatgggaaagagagagcagacaggctgctaataagaagcccacacgaccgttggaacacatcgatctgacttgactttacgacatgattgatatgcggcgactcttacgaacgtgtccgtttgatgactttgattggttgtagctaatgatacatttacgaaatacaatacgatggatcttggagctcgttgtcagattttcagttcgtaggttttgtccacaatcgtttcgtgactcggtaggcgaacctgacggggacgccagggcgttgtcgcaagatgcaattaccattcaaattcgctttaaacgaagcgtaggtcagatgtgcttgtaattttgagcgtcagggcttagcttacccagtgcatcgcgaaaagacgtattctttcccgttcgctcggataaagccatccttgaaagtgaccttccacttgttcttcactcgttgaacctggttcgagcggtttctctttccaatcagccaataacttacggaatggtcaaacaggtcaaggcctaccttgtcgcacacgcagatcatgacatctttcgccaaattgtctgcctcttcatcgtcctcgtcgtcgaaaggcccatcatcgtcgtcctgatcactgtcgtccaggtccgagccgatgatctcctcgcccggataaataccattctcgttcggcttgacttcgggattgcgagtcaacaaagctcctctggcgtctctagtcggcttgctggaaggcgaaccagggtccgcagcatcatcatcaccgagcttggcgagcttgttgtactctgccacctgacccgcatcgagcttgccatcggtctggaacggcttgacgtcgtcttcgtcgccttcttcctcgtcaaattcctcatcctcgtcttcagatacctgcgaataacatctagcgtcagcgcttgaacctcataagataacctcaacttgagactcacctgtcctcctcgaagtctcagcgtgatcgttccccctttgagtcccccgtagtaagccccgttgccatttgcgtcgaccccgtattgcatgtgctgcgcttgctgttcttgcgcaagtccgtatgctccttcatcctggccgtaatcgccttcctctgcattgggatcgacgtcgtcatcttcagcctctttaaacggagccactcgagtcaagcggagattcgcctcccagagctaggtttatgagccaagcaagtgagaccgctgaaccgatagtctcggcctcgggtggaacaagcacgctcacccttctcaaagtcagagcaccgtcctcatcaagaccttcttcctcgaatctatctttggtcgcacctaccacatcatcgatgatgcctgcatagagggagggctagcgaaggcaacgcagcaagcatgacgctgtcaggctatgtgcaacaaggccttcacacaaccttgagcaccggactgatgccacttacgacgactttgttcgaccttgcatccgcacacagatcgtttgcatgagtacaggctgaaatgtgaacatatgatcattgtgatactgacatgatcaatcacgaagcgataatcccagattcgtgaaccgccggccagtcaagaccaccacaagttgctgtcgaagtctgtttcggcttcaggttcgatgttgtctgccggcgacctgttcactccatcaagaattgcacagggtctcgactagcctggcagtagaaagacgatacagttgaagttcggcttgacttgatcgatgagtgggaggttgggggtcgtgaccccggccatgtccccgccggcgagcgagcggcggacatcgagacaaacaaaatgtccgcaaacgtccgggctaacaggctgtgtctaacttgtatcctgctgccatcattggtaggaatctcgaatcgtacaatcgtcaagggtcattatagaacgtttgtcatcaaggggattcatcatcccctgctatcgtgttccgcggtcggcttgtcatcctgctcgatgatctcgaaaccaaggtctacggggctaagccgatcgcccttctttactgcctttttccctcgtcgtttgtgcttatttcgatccggtgtagtcgccgtattgggctgcatggcggatgtgcttcgtgtcaaatttgtatcatgctgctgctggttagcggcaggctttttggaaggatgaacggagtctgtcggcgagctggggttcataaggtccgagatatcaagagcactgctgcgtcgcgtcttggtgacgtgtgcggtgtaacttgtaggttgttcggatagggagatgatagtcggggtcctcaaagtttcagttcggacgggagagacatccgtagccacaccagaggagtctaccatcacctcgctaggagctccgtgccgcagatctcgatgactgtaggaagagattgtcttttggccgtgattgagcaagtgattccccttccggctgctttgcaacgattccgcttgcatgcgcattcgctcgatgtctacggttgtgggcgtcggtagcacgacgacttcctggctatcatcatcctcttgctcggcggattttggctcccctttctccgactcttcgtcctcgagcatttgctcaggcagacgaacgattctgttgtcgtcaacagtcggtagagcggacgtcgtgtcgaccgacatggcctcgacttccttgtcaagattcggatccggatccacctccatctcacttggcatgccatctgacgtgatccgtacgccttcaatcccgctatttaggtgggacgtggacgcgatcgaatcggtcgtcgcagcagtagcgcctgtgaacgaagtggtggagaccagagtcaaggccgagtcaaggtcctcggtctcgtgtgtcacctcgactcgatctcgatatccagacggtcgtagagcagctgcgttattctggcctgtcgccgaccggtcattaactatcaacgatgatggcggttgttgcacgggaggtctaggaagaacccgcacaggctgtaagaaggagcttgggtctgatgcggttcgctccttgtatacgggggcttcgactgggacagacgtctccttctgaacacaggccttatcatgatccgtcggccaaatctcgatcgtcgagtcttgactcccggccacggcgccaaatggtaacgccgattgattggtttcttctggactactcagcggatcagaaagttcctggatgatcttccgccacttctctcgaccctccaaggcgttctcgccttgccatcgagtccggtaatcctcgattacggctccgttcagctgatcctttttgagcatcgttttgaaaatgaaacccatcattccctctggatcgtctaggagaacttccatgaagtgaaggcagtagataccgcaatcactgaaattttgttgcggcgggacgctgaccgacttgtaaggaagcggcttctgcgctctcactttccatgacagctcgacattcttcttctcccttgcctcgtataccagccaacgattcaaggtgacaccaacggcaccatgactcgaaccgagcgagtcaaaggtcatgatcagtccccttcgatgagactccgtgtgatcggtgtcatcgatctcgatgggtgccagagggtcttggccacgtgtatgcgcggccgggctcaaagccgattccaaaggttcaatttccatcgcgacagcggaaacgacagaagatggagcagcggaccggctagagagttgactttcgacgcttgccaatggctggtgcatctgggcagcctgcctttgtacgacgatcgtatcgtcaatcggtagaggtggctgcgaatacgacgagggtacgttgtcgatttcggatggggatctgatttctggcgaacgtgaaagagatctggcttctgctgatgtcgccacctcttcctggctcatcatcttttgcacactcgccaagtcctgagcgtcttcatccttcccgaccgaacgagtcagaggacggactgatccgtcctccgctagtggtgtattgcccctgagaaatcgggcatcgtccaggagtacaccagggttgtagatgaccgccatgtaccagtgcagattttcgttcacgggtacaatgatgaactttttggagaagatgtccaccttgttcgtccattttttcaccgagtcgtatgcaggccagtcgggataagcctcgcgagggagaccttctgccacccggccaagccctcgagtcttgatcgagaggcggttgtagaagaaaggattgaacacgaaaacatcgtcggcgcagagtcgaccgaggttcagggttccgttcgaatcagatggaacctcgttcggttttggggagagtcgcttttcaacaatgtatcgtaaaccaaagtcgatgagcgtgtcgttaaggaactcgtcgtcgtgaagacgatagtagtctcctcgagtgatctccagctccatgcgacctgtcggcggccatcgacacatgaccttgtcgggattacgcggtttgggaggcatcgctcgcaaagcgagctcgcgctcagctcgctcttctgcgacggttgtgcgactgcttcgcctgatacctccgctggaagcagatgcggtacgttgagcggggcttttcggctgaggtctcccttgtggctgtatgtagtgacccgatggttcgtccttggccttcttaaattgaagtagttgctgtgcaggccctttcgagacaggattttcttgggtcgaacgccatctctcggcttcggccttcgctatattgaagatctgattgctgcgtgtaccgaaggatcagaacgcgtgacagatgctcgataagccggcagatcctcacgatgcaactcgtttgacatgctcctcagtggttcctatgcgtgttttatgcacgtcactaagcaccttgatgaccgaagcccggtccttggacgaaagagcttgaccatccatctcgaagcaatggcatactatcctgctgcctgatcgacgagccgattgagggtttcaggccagtgcttccaaccgcaaatcaaagggttttgcttacctgttgtcactgcttggtaaacaataccgacatgatatggacccttctgctgttccggcgtcatgtttgggatctgcattcgcacgggaaaaaaaagttagagttgttgagcaattgctggtcaaccgcgattctcacaaaaagattgatgatgtcattccatttgaatagcagctcgctataagcgatgccatccccgcgcttgatcaactttgcagattgcgcatggaaacctttcccgtcgacttcacaacgattgacatagcctatcaatcccgccgggggaccttcagcgggacggacgagtgcctagaaaccataaacataagtcgccgtgtcccgtctagttcgcgcggctcaaactgaacgtacactggaattgccattcttatcctgcattcgcgctttcttcgtcccgacaatcgatctcgacggcgagggcatgacgcggattgtctcgctctccgccgcatcatcgaaatcctcgatgtcatcgcgcccgtcgtcttgcggatccactgagctacttttcgacacgcctcgtttccgtttcgcggtctcctgtccgcttggcatctcatgctgtgcgagattcctagcagtgagattattcggacgttgactgggtggagcagcagatgcatggtcgacgatccgactccctgaagcgacgggcatttgcgtctttctcggttcttctcgctctggcgtctcctcttcatcctcctccgagactaaatcgataggctcggcagccggatgacgattcttgcgggcaggcggaggtctgttgacaggagcagcgatcgggcgagggggtgaggattcgggccgaggatctggcggaggtaagaaggtgttcgggtttctagcgtccttttctgggaaatgcttgctaaggtcggtacccgggtagaatgacttggctgaaacagcgggcaaggtctcgtgagctctacgctgagtcatatcaggtgctttccgtgtgcttggtccaggacggcttgtcgtcacatggctttgactgaatggcgacgagttggccttgtgggcgttcggaactctagatggaatcgcgaaggccggcgggatagggggaggttgctaggaaagattaggattatcgtaagcggagcgtatagatcatttcagaacttggaacctaccttgggaagctcgatgcgagattcttccacgtccggcctaggcttccgtaatgtactttttcttggtaccaaggcgatctcactgaatatcgtgagatgatgagttttagatcgccgtcagggtagagaacagagctactgactcggcagattcagatgaggcccgatttctgtccgagcttcttgaaccccatgcatcgggtatcgagtgttccatatcactacctgccaacctgctgacgatcttagcgttgctgttgccgataagaagatagtcagcgagaagtcaagcttggattgatgaaaatcgacgtaccgtcccaaccattgcgctgccatattgaccagctcggaatacaaccatcaccatcgatccgatgctgtggaaaaacctggtctatcgtgcttctcggcggaaggtagctcgaatgccgggcttcaacagcttcgacgcccttgttacgacaagcgagcaatcggatctcttaacgatttgcagctggccagctcgagcggaatcttcggccacgagatttatcgctagatcaagacgcctcgtacaacctctgaaggcggtttgtgcgtcaacggtgagaacgcttgacccggtatacacttctacggtatgactgatcactagctgatcactcgcttctcgacaggatttgaagatgtctgacctgttcggcgattccaaagctcaggattggcgacgcgcatctagcgataactaactatcagcaaagactggccagtagatgggactggcgggaaagtatgttgtgtggtactacaatacatgtatgcgacaagctggtaggcacaagaaagctctagacaagaaacccaggtatcaaagcgagaacgaagcagtcgggcggatgcgatcatagggcgttaaagtcgaacggcttgtcagcctcggtcgacttggccgccttggtggtggtggtgctagtcgtcgatttcttgccgttgacgggagcagcggcgggtgccttgtcagccttcttggccttgacgggcttggcggaaggagcctcgccgctgtttgccttgccgatcgtcgtctttttcaagagcgacttgagttcccgtttcactggtagagcagcctcgacggcagccttctcagcctcgtcccgcctgacctttttgccatccctcgacccgtcctcgtcattgcctccctttcgcttgagcttgccactcgcgacgaccttgacctcggcccgtttgagctctggctcgtcactggcgaactgcaccgtcttcaactttttgctgagtacgggagcagccgtggcaggtccgagcgaagactttcgctttcgcttgcggtcgagctttttggatgcgaccacctcgacctcgggttccgactcgctcggcacgtcatcctcgtcgaacacgacctcttcgcccgactcttccagatcttcgtcgccctcgagaccgtcctcggcatcctcaaagtcgagctcgccctcgctagactcgtcgtcgtcctggatcatctcttcgtccaagatgagctgcgaggttcggtcgtcgtttccgagataagtgacgtgtagtacaacccggagacgacgattcgactcaccactcgctcgtcgacctcgggcaccttgagcctgatcaaaccctttccgacctttttcaattcctgcctcggcttcaacagatccagagccttcttgtcggcgtcggtgatttctgctcggctcttttcaatctcggacttggtaggcagagtatagtatgggaagaggttgtgagcccagtcacgcaggaccgtcttggcagcagcctcgacgtcggcgtctccgtgctgaatagagtgcaagggacgagatgggattagcggaaggggattgcctgactcgagacatctcatgcttacctttcggatccgtccctgcgctcgtgcaacgctgatcaagaacgtctcgatgtcaccggccgcaaagtgggggatgttgtaggcgagcatcaaatcttgcgggttggctcggttgacaatctgcttgactattttttatgtgtcagacgaatgggtgggggagatcagtcaacaaagccgatgtccacgctgaccggaacccgagaactcacccaaaggcaaggcatccttgaccttgtcgatccttcccaagtttctcgtcaacatgtccctagcgaccatctcctccagggcggcccacttgccgtcgtcctcctcatcgacatccccatccatctcgtcgtcctcgtcttcgtcctcgacatcgggagggttaaactcgaatccgggcgtatcgatcaacctcaactccttgtccccgacctgtacgccgagctcgccagggaccttggtcgtaggcgcggcgatccccgagacggggatggtctccgctgtgggcaatcggggtcgtcccaacaaggtattgatgacggcggatttcccaacgttgggttgaccgagaaagacgacgttcagcgacgagtcgtccgacttgttcttctccgtctgccaagccgagaggatggacaacaacgtgtccttgccgacggggatggcggaaggaatcgtccgaggagggagtttaccctgcttgtccaccccgtacacggtcatcccggtcttgatcggggtctcgacgaacgaggctttgaagaggacgaccttgacgttgtcgccgtgcgcttcaaaggtagacctgaggaatttcacccaagcctcggcggtctccttggggacgagatcgatcttgttgagaagcacgacgagcttgtcctttttccaaccctggggcttttgagccggtttaccctttttattactagacttggatccagatttttcggcaggagattcgggttggatgaggacgaggttttcgagaaaggtgcttcggaaaccgatgggatccctggcatcgaggacctcgacgacgacgtcggacctgtccagagcggcttggatggtcggcaactcggtgtcgaccagatcgggaatctcatcctcctcctcctcctcgtcatcttgctcgatgtcgagctgcttgccctttttcttgtccgacgagacgccggcggggtttacgggctttttaccgtagacgggcaagacgcccgggttctcgagatactcgtcctcgtccacctctcggtcgatcttgcgtctcaatcgtcgttcctcggcatcctcttccatgttcacctcgccgtcctcctcttcctcttcatcctcgtcctcgtcctcgtcgtcctcatcctcggccaaggtctgggcagagttgatcaacgccttggcctccttggaagcttccttttgagcctgacgtctcctctccttttcctcctgagcggctagtttagcaccagcgagctcggccaagatctgatccttgaaggggaacgagttgggaataccagggtcggtaggtttctctacaaggggagagcgggggaaggtcgacgagcggggtaagtgatcagtcagaggtgtcgggcaacgctgcagaagaggacgatcgacgacgacttactcgacttccacgtcgagttcttcctgttatccctgttgttcttctttcgggtctcggcggcctttttcacgatcttggatcgctggaaggtggtacctctcttcgaggtctctgcggtgaaggatgtcgaccaggatttagctcatgtgccatgctggctgttacgcactgacgcttgcttttttgactcacttttacgaattccacccattttgaatgtacagacgagttttgtttaggttcagtcgtggtgttatgatgacccgattcaagacgagacgaggcgattctacttttgagctttcgactctgccccaggctggtccactctggctgtactcgcttgaatatgagtcctggctgatcgaaatttccgcggatacaaattgtgaaattaggtaataacgaccaagcagtgagacacggacatggagttgtttttgaaccccaatcatgtacgtaaatctatttatcggatgtccgcgtttctcgcttcatctgacagacgagactctcctcctcgactcgatctgaactatagtagtacagagtctagtcgttggcatcggtccagacgcccagcaagacacatcgtcgatacgcaaaccccaccacccgccatttccctcatcatgccctcgatcgccccacgaccatcccttctttcgctccgaaagacactacctcccatcctcaacctcccctcgacgtccacggggaacaatgtccctaaatccctgcacaagacccgtcggacatggatcaccaacactcaccgtattgaccagcccgtccgggtcttggaatgcgcacacaaggataaatacggcaggggagtcttgaggggagtcaagatgcgggcgagggacgtcaagagtttcgacaaggccggtggggtcgagggtgctctggtgagtgttgtcgtgtcccagcccgtcttcgtctcgtctccaatcactgcgggtatcttgaaattcattcgatctttcttgtactcccctgtattctcgtccgtcagctatctcaatcgcccaacaacctcacgccgttcgggaaacaactccgctcggatctctttacccggttacatggcatccagaacccttcagcgtccacctcgacaacgacgtcggtattctcgcttggattgggatcgagatgatgagactttgatccttgatgaaaagggagtctagagcggggaggaccaggttcaaacaccgggtatcatggggatgatttgatgctggtcacggaacgtcggagtcgatcttagcgatcaacgcgacgatacgcaggttacaagtctgggcctggatataccgcctcatcagctcttttccaaaatcacccgagactcccaggcgcagcgtcatcgccagataccgctcggactcgatctctcccggcgaagcaagtggagatcacaccattctccctcctgtatacctaacgagactttttacgaatatggatacactgcagcatacatccagctagtgcacgtcctttgatctctggtcgggtgagccagccatgggtgaaagatgcgggtcgtccagagggacacggtcgttctggcaaaaggtcgccttgttcctattcccgcttgacattcccggcgtcgtttttggaatccggttcatcacctcgaccttgtccccgctagcatttccatctcctgttccctctctcgaaagaggttgcaaggttgaccatcgggtcgagatcaagtcgttcatcagtctcgtgcccatgtccgatactttgggttccgaggtttcgaattcgcttccgctcggctccgacgtcactcgacctcggagctcatcgatacaactacatcatcatcccacgccatagctcatagtggaacatcgtgccttgacccccgacccccttttgagttgtacactctttcctgcaggtcgtgtgatacccttgttcctatcactacagactcgcaaacatgagctcgtctgccagacccaaccctggacccacgactacgggagaaccttctccacccccgccggatcatgtgcagacgaggtgtcgttgcggaaacgtctcggtcttgaccgaggagcgagagtcgtccgatgaacagccttcgagtggttctggtctttatatcgtcagtgcctctctctctcctcctgtctcagctaaacgggccgcgtcaaacacaccgtatgcggatacacggagtggctgacactgctcgcttttctttctccgtgccatgacccgatgcttcagatccgggaagagctcacagcttatcgacggactctggcttaccatcaacggcaatcccaccgtagagactctgtcagtggatcgtccgcacgagctcggagggtgtccaacgatttccccaagcaagggcagggattgcaggatagggctggcgaatcggatcccataggtcgaggaagacgcgggagtcgctcggctggcggagatgaggacgaggatggtgaacggatagtcatctgcacggtctgtgacgaagacgtggtcaaggccaaggtcaaggtcgaggctggaaagatcaagatcgtctcggccctagaggtcttgtgcgagaaacgggtcagtgcaggtttatccgcagaaatccgtacgaagaaacgtcgaggctgatctccctcatccttgacgcagagccccccttcgagtgatcccgaagtcaaacatgctctcctctacccgtttgacctctcccaccttccctcctccgagtcgtacggtgctccacccaaccttcccactccacctcacttcaccacactcctttctccgctcgcagacccattcttcctcccgcctccgtttacgccctccgatccatactttatgaagctctccgaagtcgctaccgacaagatcagaagggttcgcgaagaggtcgaccaggaaatcctcgaattcgtgactcgcaagaggaaacaagtggcatctgttcaacggcgggcaagaggcgaatgcgagatcctctggaagagctacgagaaggcttgcaggatgcgtggagtccctctcaggggtgaggagaaggaacaggacaccaaatctaggccgagtgtcagtcagggcaaggacggggccacgggcacgaggtcgacaagcacggagagacccgctaaagagtctttcggggagccgtctgtcactggactcggatccgattcggctctcgatgtaccagacaggcgtacggcatcgaggatgcccatcaggtcgtcggtcgcccagactggatacggctcttctctgctatccgcctcgctctctgttagctatttcccgcaacctgggcaacagccacaaggcggcggtatggcggctccgaccccttcggccaatggggatgatactactcctcgaccaggtcgttcccccatgaaatcgcctcaacccgtcgtcgatcactcgtttcaaaagtcggaacccatcgggagtggttccctcaatagcaacccgatcaccacgcccttccatcgagggaccaaatctggcgtagatctcgatgtcgtctcgagtctcaggatatcgcacatggacgagaggttcgggcatggtgccgccatgggcggcggaacgcgtgctgtcacggccgaaatgcatcattcgctctcgcgaaagggaaacagataccacaacccgctggatacggacctcgacgtcgaggctgacgatccggccgatcgggaccctagtccaagcaagctggacaaggtcctcgagcgggaggaagatgtccgggaaggcggcgagggtgacattgcgctcaacccatttgccgaaagtagtcaagtcagtgcggccagttcatacaaggaccagaggtcggacgaggaaccatccgtgcacgaaccggaacgagtggcaggtagggagagggagatgccgcctaggggaaggaggccatcgtttctggttcccgaagaggaacggacgcctcgacctagaaacgtcaaacacctcagctcgtctagcccagaaaccatgaggagattgtcaaacacttccggctcgaggcgttctgccatgggtggtgtaaaggccggcggagaaggggatgagaaggaggatggcgaagcaccggtgtcgacaaggaaaaaggtcaagtttgacgaagccgtcgtcgtcaaggacgatcaggcgaggagcgacgaagagcaaatcaagagggaaggcctcgccacgaacgagccagaggactcgagtctggtttctggtccagacggtgagtgcctggttatacgtaagcaaacgaacttcacaactaattcgctcgatgacttccgtagatgccgtctttgatttcgaagagcacgacgcgcctagacctacagtctcttcgtcctttacgacatcacttattgatgacgccgaggcgatggaggcttcttcttcacctgctcagcaggatcagaacaggactatgaaggagaatacacaattggtagaaaagaagctcatccagttgatggccgccgatgcaccgtcgcaccgatccgcttggaggaacgacacgcaaaagttgtggcaggctctaggtcagactaccaacagaaccttcatatcgccctcgacgtccagacggacccgggaccgtgctaacgactcggacgattcagatgaagaagatgaaaacaatacgagcttgtttgctacctcgatgccagtgcgtatcgccatacccaaggagagcggtatgccgaaagagctcgagcccaagaccagtcttgtcgatcgcaaaggcatgttggtaccaccgctcaagaacgcgatgcgacgggcggggtcttccgactcggacagttcttcgatcaagcgagctgccggtacatcgacaggacgtcccagggacggccaacaagacgtgtccgtatcggcttcggtgtcgaacatcgcgatcggtactccttctagcagacaagatcttggccgtggccaaggtcgagtgctgtcaccgcccagtgctagctatagggacaagagctacggcggattctcggtcgaccctggtccagccttggaggctatggggacgctcagcgaggaggaggaggacgcgtattcagccagcgtcaaagcgggtgctcctgggttcatacccccacaccgacaagaccgatccggatgatcgcctcggatcgcctttgtctgtaattgtcgtagattctgttgtcacatttcacgaaacgctttttgtgcctagttgtataagacgtgctcgatatcaagttcagagggtcctcccgcgatttccttctcgttggtttcgcccgccgcaggtcacgacaatctacaagtgacttggtacgcctcaagatcacgccgtacctgcatagataatatatcgatgagggcgctcatgtcgtctacaaccccgcccgccacgtatatgtctagagcactcaacgtcgagtctggtcgccctggtatcgtaagaccttggcatggtctcgcatactggtcactgtctatacatcggtctgcttccaaacctgtttgggaatcatcgacatgctgatcggggagtctgttaaggagagactgacaccctgatcccaggagtatggccgcgttctggatcgcccggtagctgccgcgataagcaatctgacaccccgacgtcgactgtaggtacccgaaagccgttggcgccaaggggaaatcgaagcaagatcaagtacccttgacattgagagagatttgtgtgatgaaacagcatactagataccaaacggctcgccagatcatgaaataccacagcatgtgcttactgaagaccgcacagtgttatcctggcctcgacacaaacgaagaaaccgagcgcaaaagtcgatatatttgatacattgtcaagtttggctgctacaatcgtattatgatagttgaatgatgtcgttcatggtgaaccatgactgcagatcttagtaatgccgcggccgcttgaccgtgggccgttcctcggtcggggaggaaaagccgtctccgtcctttttcgaacctatgtcgctcgccaggctgcgcgaccacagcatctgggctcggtcggctgccgtgtaactcgaccgtcgatatggaggcaaggcggacattggtgggagaagcagaggcatggtcaatgggtccctggatgattgctgaatgaggggcagaaccgattgtggattcagtatcgggatgggctgagccgcgagcgccgctcggtgttctgccatcaagcgcgcgcgttcgctgttgcggctcgacgcgacggcgaggggtgccgcttgctcgtggacaggatcgggcctatactcgagctccctgatggtgggaagtttgaggtcacgcggcttgtaggacacgagtgcgccggcggtgggctcgggcgatgcgatcgctcgataggcgtgctgctgccgagggcgggtcggtcggaagtttcccgaatttgatgccgaagcggtcggcagctcttcgatgatcggcgaacttggcgatttctcggaagggctgggtattgagtccgaatgcttctgcaggaagacgggtccttcgtagcctagaaaacgatgccgatgagaacatgatggaacaatgtaagcacggcccgggatcggaaaggaacgatcggcaactcacctcgcatgttttccatggtaaaggtgtccctgtagcgaccgacgagtttgttgcccgatgtgacatagcacctgaacagccacttgcccgtcgattcggggataccaaagtccgtgtgaatcgttacgagcccgtcccacgccctgacgcggccttgtatcttgacttctccccaggcactaagtcccgtacccgagatgagaatctctttcgtccagccgggacgatctggagcgctttcatccgtgcaaggttcccaccctctctcctcgacagagaggctcgcctcgtattcttcgtcctcggcggtgaggcccagtctgaaacccgcgttgagcatgggtccatccccgccgaccttgtcgatcttgacgttgatgacgcgctcctccagtcgccactcttgcatctcttggccgtatgtcccctcgtagaggctgcgcacgtctcccttgacgacgtgctggtaggcgttgtaatcaaagtagaggtacttgcccttccacagcccttcaatctgatgacggaaggccaaagggtgcatccccgaagaggtgattgggtcgtggcagttcatggctcggtacaagtcattgtcccagtgcgtcgagtcgagtttctcggtggtggagagcaacggtttgggtccgttgagcttttgcccgctagatgaagcgaccccgggtcggggcagctgagcgccagggttcttccccagggtgatgagttctgggtggcgctcaagcagttgcataaaggacagactggcgcaagtggtctgataaggtgaagagacccgccaccacctccctagacgcttgacttgtgttgaacgaggattgggagacagctcgatcatgaaagcgttgggtcgactgagcatagcgagctcttcctcgtcccgggctacccggctgagtggcaaatctcgatgaacccagggtccatacaggaatgggtactgtgtcagagggacaagcggatcagtttgcctgccacggcgcacgatctgtaagcgccgggcgactgaccttgtgacacgcaaaaacgtagggcagcatgatgaagaccttggtttcgatctgttcgcgagtctcctccatctcggtatcgatgccgagcctgttcgagatgattgtcaagatggcgccttccgaggaatcggtagggtaacccgcttggagcgccgcctcgagcatgtgttctcggtaaaagatcttgaccacctctctaaactttgctagagattcgagcacgataaagttcttgtgatctgggacgggaagacacgggaaaaggcagggtcagctctagcgcacgaacttctgctgtggagtgggcagactgaccgttctccatgtacatccaccagatgacccaaatgtcggctgaccatttcaccttgtcgtcctcggtcttcatcaacgcgttcaagctccctctggctgaaatctctcggtaccgcttgaacgtctcgaacctatccttgtactcgttggcgagcaagaccgggtcgctaagcaggtgaactccttccctgcagacgcatcgggtcccgttctctcgtacgccgtgggtgcaggaccgttcgtcttcctgctcgacgcccggttcctgtttgacctcgacctggtcgaaaaaggtgtcaccgaccgacgacctcgtcgatgggatggcggcatactcgtgattgggtcctccgttctggtactctttccaacgtctcgtcaaggcctcgttgtcaaaggtgttcaggtacatccagtgatatagcttggggttgctatcgaattgcaaggccttgtagaggtgtttgcaagtgagcatgagagggaggagtgatcgtgggtccgggatggtacggttggcatagacgtcgtccttggaggccgccgcggaataatccgtcaactcggactcgacccccttggatcggatcgaagtggatgaagctcgacgagagtacgaagtggacgaggtgggatatgatgagccgggtgtggccacgtcgacttggtgtccatagtgtcgctcgggttgaccttgcgatcggatcttggtcgaactggaagacgccgcactgacttcagacgcagcggtcatcaggacgtccaaccccgatcgatacgagggtggctgatgagcggcgggtcgatacgatggcgaaaaggtcgtcgaagaggacgaagacgacggatcttccctccatgccgatgccctgccgggcttctcgcctcccatatccatccgcctgacgaacggtccatcgacgtcatactcgaccgaacggacctcttcctgttcatgtgcgatggcatcgacggtcagtggtgtgactccactgaacatgacatgctgggcgatgaggtggatgacctcggctgaaaggtctgttaatgtaggtggcattcgagtgtaggtgtagagtgatgacatcggtcccgaagagggtatggtgggaaccggatgggcgatgatgtcaatcgaagtgatgatcctacgtcgtgggcgtgatgttattcccggccgacgatggtggtgggcggtaaagcgacttgacgaaacactttggcggactttgaaccggtgtcagtagtcgtgagtgagatcgttggagcaaccgatgtagaggccaacgatggtgaagttgtgttggtggtggagtggtgctgtcggtgactcgcttaaacaagaaggattgcgcgagagagggcgaggaaggtagatggagctgaatgaagggggcagggggaatcttgtgggaaacgaagaaagggcaaagagatatagactgcgtgcgtcgagtttggatcctgaccggcgacccggaggttggttggttgagtggttgagtggtgggtggttgggatgccgacctttttgaatggaagacggaccgatttgggctgggcgaggttgagaaaagctcgcgagacgggggaggaaggggcaagttggtagaaaagaggccgatcggtgccgcactctgctgctggccgccgtgcgggttcgtagcttttggtataggttttagcagccgacggacggatcttgtcactcttgggatcgggacaagtcgatagcgtggttagaggcgagcataagacggatcgcaaaagagcgcgagaggtgaacgtcaaacacacgggaaactggtacaaggttggaggaaaggaacacctagccgtatatacaaaatcccagattcagatcgcgcagtaagagtaccgataacgcacccaaacgtttctcgcttctctccgacaataccccctctctccctggtgtgtccctctcgcctgcccgtgtgtgaccatcaagatccaaatgacgggacaaaatgagtagacgccccgcgtgcgatggtgtgtgggtgggtgtgtgcgacatgagggtgtttgccgccaactggtgtgaacgagagagccaagagcaacaagtcgatcgaatttaccttttcgtatcgagagccaaaaacccaacgacgaacagtcatacagggcgaagggcgacgggcgggatattgctaatcggacatcggacgatgcgattgataccgaaacgaaagacgacctcgaccgatcaaaggcgtgacagcaggggcaaggagcaaggagagtgtgtacagtcacggaccgaacgatacatcaccgaggacgaccacgctcgactaccgccgtcgtcacagacgaaccgacagaaaacgcctccgacaaacgaaacagctccgcctacccaccgtgacgacccggcctcggtcaggagctggatcgaacgaatctatcgacggagggccacccagcgttttgattcccttcgtccttctcgcgcgtgaccgcggcggctcgggacaaggagacttcttttcttttcttcctttttttttcagtccccgtgatgtcaaccggatcgccccgggccggaacccgtctctggatcgccgctgctctgtttaatcccgttcttgacacttctcgttgatcgtaaacaaggttgcacacgaaacccgacgatccttgtcaacaggactgtcgttttgatccctcactgccgagcgatatcgaggcgcaccatcatcttacacggccggatcaaatggttgttaactcttttcagtgccggtgaatgattcgacgacgacgagttcgggggtcgtgacagtccgcgaacataggagctcaaccccgaagttgatgtatcatcaaaaagaagtattgcccaaacgtatcgccaaaaaggtggatcggatcgtacaagtgctggcagcccgtcaccccgtcattgtctagcgtgcggcgcaagtcgctcgggatcaatcgagctgtgtaggaagaagaggaacgctatctgtatcaaaccgacgcgggtccctctttttcctcgtcgagaggaatacggtgttgctgctcgatggactggaatcgcgggaccagtctttcggtcgtgccgtggcctgatatgcgtcacccccggtaacccctaaacacatgacctatggcaatccaccgagtaatccgcgtgaaggtgattggtaaaccgcgaagattctcgatccggtctgtgatctgtcatccactgctgccaactattttgcaccgcctcgatcctcgctccaacgattattattttttcgttcgagagaccctctgtggagcgcgagtcagatgaggggacggttcacggatcacgccatctggagggtaccatagattctcaccgatcgagaccgcggtccaggtccgcccaaattatgtgaaccgtaccagacccgcacgacaatcgctcgtatagcgtctcagagtgctccgcctgtccatcgcttgtaagttaggttgtcgaccgcagcgtcttcgaggggttcaggtcggtccagggccgagcgcgtacgcgggagtcgagcggaatcaaacggcggctggtgctgctagtggtcccggtcggcgatcacggaggctatatgcataggcgattttgtccgtgagatccggccgtcatcttgacggcgggcgattaactccggattgggcccgacgtttcaaaggggagcaagtcgtcatctggatgagagggaagtcaccccgataggccgatagccagcatcgatatttcgtcaggtgtgtttcaaaactgataggcatcattatgcgaatggtacgagtcaagtcgtgttcaactttcaaaacccattcgatggcaataacagcacgatcaaagaacaaacggcgaggtgccgtcggaattctctttgcgttgagagatggcggcgagtgatctgatcaaaggacgcaaaggcatcccttcgatcattgtttgattgatgacgtcgtgtgatcaaaccaaagttgattgttgtttattgtcgggcgaacgcacacctttgggtcttttgattcgatttgatcaatgaccttcctcacttttggctcagttgattctcatttcagccccctcggaccgtatcgaccttgaccgctctgaacgcttcaaagaagatcagggtaatccgaaaagcaggacgagaaaacactccagcgaatcaaacgttggtgctcatcgtgggtcagtctcgatcgaccctgctttgcagacccttgaacttggaaaaaagtccatctcgaaaccgatcttgttcgactcacaccgatgcccaccgcaatttacccaagcgacgacgtcaagacgtatccaatgcagtactatccgaacggacatcaccagcccggaccttacaccagtcctcaatatgcctacccgcctggcatgggcccgaacttgccttacgtcggcggcggaccaggaggtatgggtggcggggcggccagcatggtaggcggtgggttccaccccggccgagcgtacgaatcgttggggtacgactaccagctcccctctcgaggctactcggcggaatactcttggtccgggtgggacctcgctcaagctcaatacggcggtagggacccgggtttcgatcgaggatggttcgacgggatcatcgggagcgtctcgtcctttttcaatagcaggaggatgagatatgaagacgccaaggaggctcataggagggtctaccactacaaagagtaccagactagcgggttcgaggacatctcctcccgagtcctcggaggcgcagcggcgtttcaagcgtttctgtgaggcgtctcccaggacgaatcaaagtgttctcatctgacgcgtacatctcgcaggatctgggacaaggagcatttcagcgtctaccacgagagaccctctcaagagaaccgggagaggttgatcagtctcgccgtcggagagagtgagcaaataatttgtgtttcgtggcaagtgatagtatcgtatcatactgacctggtattgtctctcatggcgatcgcgatcgcgacggtcagtctactctctgtacgaacgtctcggactccttccgacaactcgcacggccactcataccctccgtctcaacgaatctgccgaagcggccgccgccaccgccaagtatttgtatgaccggcactacgacccggacgaaggcgtctactctcgatacgcatccgacggaggcagtgggatgcgacaccgaaggagcgggagctttgccggcggcgatgtcgactatggaaggtcgagacggagccacaggaggcatggtagcgactctggaagagagctggaaagagagagagaaagggaagagatgacgcgtagggatcagatgagccaaatgagccagatgagcggtggagcgatgccgggaatgatgggtatgggcggtatgggcggtgggaatccgatgggtatggcgggaggaccaggcatgatgaacatgtcgcctttcggaatgagggcgcctatgtcggctcctgggatgatgggtaatcccatggcaaaccccatgatgcagggctacaaccctgctatgatgcaacagatgatgatgcaaggtggtggaccacagctcgagaatatgctcatgggacagcacagcgcccttcatggccaggctatgccgtgagtccggcctttcgtttgctggcgagatggaattgacgcttatggatgataccatcgtagcggaatgacaccggagtacgcccaccgtctggaaggcgaagggccggtcccaggcacacgcagtgagtcggcgagccgtggctcacagccattagtacaaagcttatatatactggtcagattattacgatatgatgagtggtatgatgggcggtatgggtggtatgggggccatgggaggtatgggcggcatgggctatgggggccaaggatatggaggtccaggatacgggggtcaaggcatgggggggatgatgcatggcggatatggcacgccgaggagctggtacggaaggcaataatcacgatagtggcgtcgagaaactcagcaaaaatccgtggcatttccaactcttgtcctaacaatcgtccgacgaggccgtcatgcccacatcatacccgattacagaaagagacgtcttatcgatcgttcgcatgtgaatagctggatgcgcatgcgatcccgcatcttattatggtatacgttagatgacaaggggactggctgaacgattcctacaatggtcacaaagaaggcttgccaatcaggttctcgagcaggacaaagaccactcggacggggtctatagccataattgggatgcctgcatagacaatgacctttgtgagcactgcggggtaagacggatcagcctgctgttaagttggccggaccagagggatacttaccgtcgacatcgtagtgcttcttctcaaggtctgctcgtttgcgaggcggtcttgcgctctcgatcgattgctgcgaggccgaagatgcgacgctagaaaagctctcgtgggacgcttgtcgggagcgtttctgaagtcgtagcgaaggtggaagggccgtcgtcaaagatgcttgcgacgggaggtcaacgaaggagggcaaagggttcagggtgtaaggtgtcggtactttgtcgtaatcagtcgctgcttgataatgtcgtctcgtcggcagagcaaagtgaaagatttgcgaagccgcacgaaagatgatgggcagaatgaagtgtagcagacgcttcatcaccatcctccacaggaacaaggcgccaatgcctattgacgagttagatctctcagaactcgaccgttcgacacgtttttgctagaggcatcatagcttaccgattatcaatttggccaccccaaatgccatatgagcggcgacattggcagaacccgttaatccgaatggcgtgaatccaggttggaacccgtgtttaaaatacggacggtagtgggagttgaaccaatggctcagggtcgagcctaacatcacggagaggatcgcgatggcatcttcgaaacatgggcaatctagtaggtaggagacaggctcagcagctgtaacgacttttctagcgaccatcagcagagcttatttaccatcgactggctccgggtggtaatggaccaggaacccgcagagaacgatcgcggcaagaggcgctatcgaattgaagtcgtgacgtgagtttaaagtaagagggtggaggctctgccctcccgctcctgtacggctcacctctccaatcgctttgaaccaagtatgcctcaaagggcgcctgtagcctgtcccagacgtaccaggagaaccaaccgataagggcgcctgctgaacagtcgactgcaggaaattcagcgaaattagctactcggcatgtgactgtagcccgcagtgccatccttactgatcgagtgcatgccgcagtacaatctccccaggatcacgcttagcgcatagagggccagtgctgagacgaaaagaggcggaagtccatcctcagtaagtcgcaagagatgtcgagctagagtagacttaccaaacctccccatgaccagcgtctgagcgttgatctcgcccgatgtaaacctcagtgtcaaccaagttccaaggaataaagcgatagagactgaattggcagagtgtgaagaggggaaacctaccgacgtgatgtcatgaaatggtcgagtttgaatataacgcaaatacagaggacaaggcacctgccacttaccgtattcgaggccatgtgtgctcatagcttcaacagaacgttgatcagctatcagccgtcaaaggcgagtgaatgatcgcgaagcaagacggactcacaaagacggatgacaggggggctatacggccttgggcaacaagcgagatctttggcaaagctcgagagccagattccgagtcccgtcacgatgagtagactgcagccgtgcgggatccataattagtaatcggaagacaatgcaatgttcagcactcggctaggatgactcacccacgagcatggaaatcatctccgaaccagaagaacattggcaagacggccataaagaaggtgtgtgctggcattcaggtcgatcagctgcgatccaaaagatggatgcgcgcggatacttactaccaaagagcgcagtccagtagaagtagcgatccaagaattgccctcgtatttggttcttttataacgtcaggcgatcagtcagcgcctcatccacaaagtgactatatcatgcggtatcaagctcacttgagcactcgcaaggtattcgctttcgaccttcaaacatctcgttaggaacctccgtagaccagctctccagccaggcaatatccggtcatagacctcatccggaagacaaccggcttcgtattctctgtccagcttgttagactctggcgagtgctgaaagagagctgtcgagtccatatcctcctgcgagtctagccggagcttgctgcttttggtgaatttgttttgattcggatgcttgacgtgcggacgcccttcttggccgtttggtcgcgacattgggactgtcaggtcgagctttcaacccggaatatgctgtagcgatactttcaagacaaaggtccggaattgcaaggctcaaggactcgggtcgtgattgcttgataccacaaatacgactagctgtgattcaaggtcgaccgtttcttggtttgatgcatgatgacgataattagcttccgtcgagtaaagatccgaagaagttcggtacaggagatcggggtcactaactaaaagttaccaagttacgaattcggtatcaaaccctacccagatacacatcccaaaggtcaggttatgtctgcggaatcccaatgagacgggattctttcggcgtatatttcaaggatgtcacacttttctgaccagtcaagggggaactaccggaactactaccttcgacgacgagcagctcataccgatctcgctcccgatcgcgacgaacgactagatctgctcgtcagggacctccatgcgggaagcttgttccgtggcaaggtggtactagatgtgggttgtaacagtggggcagtatctcaggaaatcggtgagtctgcgggcaggtgttgctgccagctaggctcgttaacgctccgtcgagtcagctcaggtgcatcaagctaaacgggtgatcggtgtcgacatcgatttggacttgatccaacaatgtggacacacggttcagcatgctttttccctgcaaaagccgtcaacagaccaaggagatggctctcctgaagcgccgaagaagaagaagaggaggcttgcgagtggcgacggagcgggatcgactgaacagccctcctcggggacctcaatgcattactttccggcttgttttcctgccctctatggagccattcccatgggaggaaacccgagcggatcggtcgcagatcgcgatgcagccagtcggaaaccaccagcagctcggaaacgttccaagagcgcaactgaaagctcagatccacccatcactagctttccgcgcaacctggtattttacgctgcaaattgggctgaagaagagatcgagaccgacgccgaccgttacgacgtgatacttgcgtacgatccacgtgactgaatctgtatgccgatcaaagaagctgactcgaatcggttcccctgccaggttgtcgttaacgaagtggatccatctacacggtctcgacgacggcttgatcaggttttttcaaaaatgcttcgattgcctcgaaccgagaggacaactggttctggagaagcaaggatggagaggttacaaagatgccaagcggtcaagccaggttggtcaaacgatgtgcacttcggctcaggctgtaacgactgaatgtaccgttccggtcttaggctctgaaagataactatttcaagctcaaattgcggccggaggaagactttgagcggattttgctgaatgacatcgggttcgtcaggcgagaggcggtcaaggacggatcgagtagtggtaagttttcgaaatcaacattcttgtcgcgcggccttgatgctcaggccaatacaatgaatcaggcttcgatcgtagcttggagatatattacaaatcatgacaagtgacgacagactaggatctacgatctacgaagaccatcgctgttgatcgtcttacgaggtcccatggtggaaccgagagccggtggccctcagacggggacttgaaaaacaaggcaagcggcctttggacagatgaagcggaggacctcgagtcggctgatatgcagctggctagcctcgacaatagcgcattcatcggcgggcgcccgccgatgaaagggcttgcgaatgtcaatcgcgaccgcggaggatcgatgtcgctctccaaatggcctccccccaaatcggggttgggccgagaaaaagcgaattgaagcttgtaccatacgtcgatattttcttgaggaagactaaagggtgtcctcgagccagattcatcctcgcttctgatgcaggagtatggtggtgcctcgaatcatatccatggccaggacggcatcgggattgtagtggtccgtgctaaagtctcgcgtaaaaagtggtttcggacgggttgccttgctcttgcgatccgagtgaagcgcgatccctgccggggtgtctggcatgaataccggcgattgaacatgagagctagtggctgctttgtgctggaagggcacgcctgaagaggaaaataaggatttccaggtagacttcctcttcacgacgggagtctctgcgtgctccgtgtatggaggaggcgcatcgaggtatggcgaactgttggtagaatctatatgcaaagcatatggtaaggacgggactccactgtgtctatcactttgaaggtgtggctcacctcgcgaagagttcctcgagagatcagatgcggacgtggaagatgaggacatggctttggtggctgattgaggtgatcgcgtaacggtggtgatttcgtctgaggagtgtggcatgaatatgacacgtccatttcatcgttcactgatcttggcgactcctctcctctccttatatagctgcactatcgacatcgacgtgtacatcatctgatctccaatgacccttgaacccttccgtgtcatcgggtcctctgacttgtagtcgaacgccgagggttcggttccgaggttgtgatcgtgggaatgcctcccccttttcgcgccggtttcacaggacccggtcaagtccgggcgtgagattctcttgactcgacccgtggaagtttggtgaattggtcactggatcggatccgctccttgagacagatcatccaaaggtcagaagacgagtagcgtcacgacacgtacacagattcgcacgttcagtcggaccgaatcaccttaaagttcggttccgatgtccgctggacggcccaacacgtcatttgaccaattatgcgtggcccaatttcacgctgcgagcttgctactcagctacccgtttgcatctttgggctattgtaaattgatccggacgcgcaatacattgaatccccttcgtttgaggaatgtcagcgctgatagtgagtcatgacagttagatcatctggcaggaaatccagtttctaatgatcagcagaccctcgctgtgatctgcccgttcccgtcctccacgtcttgatgtcgctgggtcctgggcgggagcaattttgcctgaccgaaccttcgaccacagcttaccctgtctcgagatctgtctttctcgtctcagcttggcaacttgatgccgtcccgtctggagacagtagtgtttggatcgtgtcgcgatcacagcgatatgattccaggcgggatctgtttgtgctgagtcaccatgacttgggactagcgacgttgttgtcagcaacctgaagttcaagacttagagtagcgtcgacagttcgccgacccagtttgaacagttgtgcagtgtagcgtaacgctttccaccttcagaatggcagaggggttccgagtgaccggtaaatcactgtaggctcacgccttcagtcgtaatcgacgtgcatagcagactagaacgtcgctgattgtcgaaagtcgctatttctcgatgagatcaggcgaaatggattttggggaaagctcgagatgatgttgcgctcccaggccctagcaggattttcggctatacctacacgctatgcaagcaccgagccagacgctgttcggcatcctttgcatgtcgagcgcaatatcgcgaccataccgaatgaagaccgatcgtcgcaaaaaagtcgtttcatccgctcatgcaagaggcacattaatgttacacccggtgatcagactatcccagcattctaggcaccctcgaccttagacttgtaaaaggccaatacctgcttgacggcctcttgtacctggtcgacgttgttgccggatcccatggcggaatcgggcttgcctccaccctgcaaaacaagatagctttagtttcactcatcatcatcgatcgttcgcgctcaggactacgatttaccttgcctccgagcaccttgttggcctcctccaaccagatcttggcgtctagcttcttgctcttgaccagctcctgagggacaaagttgacgtgggcgaccttgccagcgtttcggtcgacgctgaacaagtagatcgacttgttgctggccttgccgtagtcggcgccggccttcatgatctaccatgttcaaaggtgaagattgatcagattcagtggaacaatcacaggcccgtacctctcgaagcgatacgcacgtttcggtcgccctcgacatcaatctcgccaacgaaaacgttctcgttggggttttcctcgaaatacttggcgaggtcggcagtgatcttcttggacttggcagcctgctgagccttggcctcagcggcaaaggcgttctgcatcttggtgaatcgctctcgcagctggttcttcttgacgaccgacatgtcccgttgggcgagttcctgtagggtcgcgcacttctgtcagcacccaggttgcaattaatccagctggcaaaaaactcacgatgaggaacggcttcagagcggcatccttctcctttccattaaggctgtcaatccagtcgagtcgcttggagaattcagaagcccctcgcgaagcctcgtgagcctcctgaccggtaactgcaacgatacgcctgattcccttggcgatagaagattcctcggtgatgacaaagtccttgatctcgtccgtctttccaacgtggctgcagaagcgtcgatatcatcagaatggtccgacaggtgtcgagaaattgtctctgctactcacgttcctccacaaaactcgacactagtctttgtccacttggggttctcgatatccgaggtgatctcgtccaaagagaattcaagagtgacgaccctgacgggatccgggtaagcctcaccaaagacggctcgcaagccgggaatggcctgagcgaccttgaggggtagctcggacgagtagaccttgactgccttcttgacccattcgtttgacatggtctcgatcttttcgagatcggcaggggagatggcggccttgtgactgaaatcgaatcgcaacttggtgggggcgacgagcgaacccttttggtcgatgtggtcacccaagacctctcgtagacagaagttgaggatgtgagtggcagtatggttgtttcgcaagggccatcgtcgttcctaaagacccaaaaatcatcaggaaacgtccaactcttggagactaggcgaaaaacagactgacctcgctgtaggtgcaggttacttcatcgccgaccttgacctcgccttccttcatgtatccgacgtgcaagacgtatccgttgaacacctggacatccgtgacctcgaaatcggccttgccatcgattgtcattgaaccagtgtcgttctcttgtccaccggattcggcgtaaaagttggtcttgtcgagcaagaccccgaacattgatcccttttccaagtccgacgtggtgtcgacgaattttgaggcctggtagattcccttgatggttccgctcgagttgccgagcactgtcagtaacggccagcagtcgaaatcagctgctggaattcgagaaaattgtcacaagctcattgaacccaggtacgtacggaacttggccgaatcatcggtcttaggaatcgagtcattcttttccagaacggcgaggtcgtgcacgtccagcttgaccgtctccttgcccttggacttgccaccggctttactggcttcccaactgtccagtttagccttctcaaaggcctcctcgtcgacggtaagacccctctcttcggccatgatccgggtcaaatcgccggggaaaccaaaggtgtcgtacaacctccaaacatccagaccgttcaacgtcttggaaccggcctcggcggccttggtagcgtacgtgttgaacaaggcctcgcctcggtacaaggtccgggcaaacgactcttcctcctcgtcgaggatctccttgagatcggcgtccttgccgttgagctcggggaagaagggtccgagctccttgacgacggttgggcacaagctcgagaaaaaggttccgatcttgacgccaaacttgctgctggcgtatcgagcgcctcgtcgaagaattcgtcggaggacgtatcctcgaccaatgttactgggcacacctccgtcgcagatggcgatggtcaacgtcctgacgtgatcggccaagactcggtaagcagtgtcgagaccatccttgtcgtcctcgccaagcttgcccgagtagggtcgagcgccggtcatctcctggatcttgtcaaagtaaggctggaagacgtcggtgtcgtagttggactctacgttttgcaagcacgagacgagtcgctcgaaacccatcccggtgtcgatatgctgagccggcagcgttcggaggctgccgtcggactctcggttgtaggccataaagacgttgttccagacttcgaggacgttcgggtcatcctggttgacgaggtgagcggcgtttcggcctccgattcggtcaaagtgaatctcgctgcagggcccacaaggaccgacggcacccatctcccagaagttgtccttgacgtttccaggtaggatatgatcctcctcgactccgacatcgagccagaattgcctgggcgatggagagacaagggtaatgaccgggcggatgattatcagcggtgaaccctgcacgcttgcacaccggaaaccactagcgactcacttggcttcgagatccggcttcaacccgagcttttcgtccccctcaaagtaggtcacgtacaacctgtctgaaggcagaccatacacccgggtcaagaggtcccaactacagttgatggcctcctttttgaaataatcgccaaacgaccagttgcccaacatttcgaaaaaggtgtggtgatacgagtctttgccgacgtcgtccaagtcgttgtgctttccaccagctcggatacatttctgagagttgacggctcgtttaagttgacccattcgggtgctaggatcagcggtaccgaggaagaggggtttgtattggttcattccctggtaagacgggacgttgacggggtcggtgaacaagcgagttcagagcggatctaggggcacgtctcgctggatcactcacggcattagcgaacaagagcgtagggtcctcgaaaggaatgacgttgctgctaggccaaaaggtgtgttcgagaccgggcttggcctcggtaaagtatttgacaaaggtctccctgaccttggcggcgggccatgattccggcgagggccaagcgtgaggcttctcgtcgggaaagttgggagtcctcaaatcgattcggggcatcttgtctaggttccaagaggcactggtggtgatgattgtcctcttcgagaggagcggtcgaaatgggttggaattgagatgggtggtcgcgagtgttttataccaatgacgaccaagtatcataaaagaccagagcgtcgagtcacagtggcagcgacaacggaactcgttggaaaggggtttctgcttcaacgatgcgaatgttcgaatgatgaagggaaggggtagagtgaaactgattgttacatttgtcgagtcaaaatcgaacatgtcgaatatggcctaggcaggtgggtgtgtggggagatgggaacctttagtttcaaggtggaaattagagagaaaccctgtctctcacctaacttgactggtcgagttgcgagttgttattaccacctttcataccatcagtagcccagtggcgacgtgtatttgattgatcgatttcttcggaatcaaaattactccccccactcccttccaccctggcccccgcgtctttccttttgcctccactgtcgatctctctccctcttccccgcggtgtaactctctctctctctctctctctctctctcaagcctgggagcctccaaagcctcgtcccctcgagttatgacgacgacgattagtgtaacacgacgacgatgtagaacgacgatccagcgatgatgatgatgatgatgatctgatagctgaagatgaattatgatcaaatgactacgatcacatagatcatagtaattccctacgacttgcacatcacatcgcacgccccactttgtgaccttgaatacaccttgctcactcgtgcactcgatcactcggcagctcattcaccccacaacctatcactttgacgccgatcatgagctcgccgatcccatccgatgctcgaggcttcttgctgttgacactgcctcaggcgcaggtttaccaggtgcgtccagaacaacgtgtgtcacgctcgataccagctcaccgtttccacctcgtctcctatcgtagctcttcgagggacagaccatcaagatcgccgagggcgaacttatgctcgaatgcctcgccctgcctcccaaagcgactgccaacctgacggcaccgacgggcgcgctcgtcaagtacaacccgttctccgacgacccggcgcctcatctcgatctcttcctgatcgtcaaatcgggcgactttgaaatatgtctcgtaccaggtgtcaagatcacccgggaaccttcctttgaggcgtctcacgatcggacccgcgtggataccaacccgaacatcgtcttcagagtgccctcgcccacggtgaccaacgcgtttgtcgacattgtgatcccacgaccagcttccgaggaggatcaacaggacttggagacgtacgagatcttgctcaggcaatatggatccctctatatcccccctcaattcgtcactcgagatatccctggggctggcttgatcgactcgttcactccatcgacaagttccacaccggcttcgccaagcggaggcaagggtcccgcccctgccgtaccccctcgtccaaacatgcgtcacagtgactcccagggccgtttcgtcctcgtagacgagacgaccggtcagatcgtcggagagctggaccaaaacctctcggtacaagagggtaaacacgtggcaggaggtgccgccagcgaacccgtcgtcatcgatttcggtccgctcgatcagggacttgccaagcagatcaccgtcaagacggtggacgaggctgacatgaacgactggatgttgaagggcgcgcattacctgagcaaggggatcctcacgctcgggaatacggcgtcgtccgggatcacgtcggccgcagagtattacaccaagaataccaaaccggccgcggaaccggtcaagttggggccagcagccaaggggagtatcaggcacgtgcacaatgcctcgacgaggggtttgaaggtgacccgaaagaccctgggaatcgtccaagacgtgagtcgatcgtgtaatgcggcgtcgatttgaatggcttgactcattcgcctcgaacataatcgatcctcaacacccaggccattggtggtgtgatcgacaaggcggcaacggctggattcgcagagtacgaggacttcaagggaaaaaccccgcctggctcgcgacccggtggttcaagcacttctcataccaacaacggttatccaaacgaaaaggcgtcctacaccccgcctggagcggcacctcccgcttataccagcgccgggttagcaaacgttcagaaccaacctcaggcagggcaaagtcagcagcctgagcaaggtcaaggcgaacgcagaccttcagccagcggcggtcagaaaaagttttggctgagagtcatcaccgccgccgaggtcatcgggaccagtatcgaggccacgacggccaacttgatagagacgacgacatctgccgcatccacggctgccgagtaagtaggcgcgcacgcgcaaagcacggtcgcgagcgatcactgacgtctcgtcacgcaggcacaagtacggacccgaagccggtcaggcgactaggatcctcggcggttcggtccataacgtagcattggtctatgtcgatgttcgcggggtcggtcgaaagaccttgatcaactcgggtaaaaaggggatcaaaggaacgatcaagacccgtttgcaaagcggcgaagagatcaccctgaaacctgaagaagggtctagcggaaccatgcaggttcaaggacagcagctcgcacaggagcttacggtccaggtcaacagccctagcccccagtcggcgacgtctcctcccggttacacgccccagaggactcccatcgaccgtcgcttggagagtgtagcccaccggggcgacaagaagaccatgtaatgcgcgcctggtcatgatttccacaccagtacgatgcgacatgcttgtacaattagcttataccgtaatacccattgtttttgctatcattacatcttgatacacgccattcctttcattggccatttcacagtcgtcatgtcatgcgggtcgtcaattggttcaggattccgatttcgggatgaagagcgtcaaaacgccagccgcctcattcggttcgcctggtccaacgagttctattcagccttgttactcgtgtgcacacccatcttgactgtcaagctcaccgatatacacgtatgcaatcaagcaataactatcgcaaatgcctggaaacatgacggccaagagatttcagcacaggggcgtacatggttgatcttgatgcaacatcgacatacacgcgattgtagtggtattggcaagatttgtggccaggaatttgagcagattcttaatgctgatgctgacgctgaacgttgggatctcttccccatcgaccccttgcgctggctcctgatccgattcttgacctgaaatggcagtggtggggataagccactagtctacttctaggtgactatcctcaacgtgacttgctgaaattcggtatcgctagtttgtcccacttggtttccatcttgaagccgtcgttctgcaacgtgaacgacatctccccgttctgaatcacaccaagtgcaaagttgtgagtaacggagaaggaaatagccatcgagccacatgcattataacgcgccttgttagcagatattgatactgttgatcctagatgcgagaacctcgaagccagcccctttagttgagctaggctaggcaggtggacgtggatctgacaggccagcgagagtaagttgggactctcccccatgacgcgtagttgtgtgctcacatctggaggaggacagagcggttctttaagttgtgccactcggttcgggttgagaacttggcagacaacgtcgtgcgtgatcgaaacgggagcaggcccggttccctaccatatcaaggcgaaacgatcagctcagcactcgaggtataccgtgtcaacagatttacctgaccgacaatgtcgaacaccaacacggctctatcattcttcttgctcagcttgacgctcgcctcggaatctcttcccgaagctgctgctgattcagccgaacgtaacgccttgctcaaagcttccaggctgacttctagatagatctcgttgttgcctcttgattcgattcgatattcgtcaaagagggtggtctaaggtaaggtctcagtcagcggcggcgttgtatgcaaacgagtctccgcacgtactactttgacctggctagcatgggtgaagacgggcgaccgactcagttgggatcgttactgatattccgcgttgaaactgacttacgaccagatctgcacgccagaaggaccactctcactgtccgaaactatgaaatgcacacgatccggccccagcttgatgacacagcttttggcggtgcttgccagtgaacggacgatttctgtaaatttgctcatcatcgtcaacacccgatgaagcattgccgctttctatgtggttggacttgctgttcatcagagaggcattgatgattttggtacggaacctcatcctgagaccctggctatcctcgtgctcgtcttaaggagcgagaagtgaccatagctcggcaatcccactgactgtatcctctcaacatgatgctactaactgaaagatgttcccggtcgaaaccgcatctgctactgaagctgatcgggggcgatcgaccggacgccggaagcagaataaaattccgatgatcatctctcgtaagataatctgcttccgccaaaagtcagattatcatgagaagcagccaggacaggttttgataaacttggatgttgaagaataatcgacgttctgcccctggaattactgggatcccgaccatcgctaatcaccacgtaaaatccatatacagtcatggtcaaagggggatctctcaaggcggctttggtcgcccagcaagccaaggcagcacgtaaagctgcgcaagtcaaagttcaggaagctctcgatcggaaagagaaatccatgtccggcggtaacaagcagaagaaccgtcgtgataaacagcaggagaagaatctgagcaagatgctagctgcatccgaggccacagatgcctcgggcgaagggaaggagaaacagccttaccggcctcgcacattgacgtatccattcgatgcgaccgatactatcctcctcgtcggcgagggagacttttcctacactctctcgatactgagtccacctcacaatcatcccgctcagcgagtgcttgcgacggcgtatgatactgagaaggaatgctacgagaaatatcctgccgcagaggagactgtcgctaagattcgagcacgaggagcgcgtgtcgaatttggcttagatgcaggcgccatcgagaagtgcaaagccgtcggcaaggccaagacctggagccggattgtgttcaactttcctcatgccggtcagtcgatatgactgatcgaccatgtcgataaacatgcgtttgggtgtctaacgataattttcgctttccgtttgatcaggcgcgggcatcaaggaccaggatcgtaacatcctgaccaaccagcatctgttgttgaccttcttccgatcggctgcgccttttcttaccgagggtccttcccgattcgcgatcaacaagaacgccaaggtcaagggcaggcccaacacgttgagaaagttgggaggttacggtgtgcaggaggacgaagaagacatgccggccgaggatgagggcgaggaggaagtcgtaatagaaggaatcgttgcggaaggcgaggaactggcaggttcggatgccggctctcaagtcgagggagaagacgacatcgggatcgatatcgacgaatatctcgctcagaactcaaaggtcgaggatctcaatgctaaggccgagcccgccgaggtcgaggacacggatccttcagcgccacccaggacccagggtactattcttgtgacactcaaagattccattccgtacaccctctggaatctcaaggccctggcaacccgccctgcagacaccttggccacacacccggcctttgttgccctaaacaggaacaagaccatgggcgtgcaaccgcgatacacagtctgccggtcgttcgcctttgtacccgatctgtatcctggctatgctcacgtcaagaccaagggcgcgggcaccccgaacaagcgagacgtcgacgatgtgatcgccagaggtacaggaggaacgcgaacgtgggaatttgcgcttaaagcaagggagagacggggtggtagaaatttccgcgggaagcctaggaggccgtgaagactgaggacagtacactgcgctatctctatagctatgacgaagtactaggatcacgaacgagcttatgtatggattcggactgaatgacgacggattgactatgaggattccgaaatgtgcaagcaatgtctcatagcaagttcgcaacgcctgccacagtctgcaagcgctctcaagagtgcgtcggatcgttagggtatttgagactaggatttttcagaaagatcattcaatcaatgtggtcacattccatgtgttactattccacggcacgccgcgaacgatcgggccactcagtctgatgcgtcctcactctcgtacttacatgcatgcgtatgtcattctatagtgccacatgcttcaagaaagaagagttcccacggtgactcctgctccggcaaggcaagacacttgcgcctaagcctcctttcgaggggaaacagtccatgcgtgattcaatcaagcagtgccataccgctactagtgggtatacacgacttgaagagcctgagagtgtttcgtagacatacccttggctccacctggcacgcctgtcgcgcctgaattttgcgggagatcttccgcctggtgaaacattcaatgtcgtctacagacacgtccgatccgaaaacagccagccatgcaaactgggagatccacaagtagctagtcctagctcagctcaatccctgaaacgcatcataatcatgagtattggtgctcgtatagtacagatcgttagtggcagcgcgaaagcggcgaaatttatcaggtagacacggagatgctcgcatcgcctccactgccgccaccagttccctgaccgacaccgacttccgagtcggcattgcctccgagctcgtattttcgcaacagctcgtccaactcggctgatcggaaaatcttggccaaagggagctgagtagccgggtctagagtcatcgtagcgaattcgactgccgtaccaagttgggtttaatgggacggcgataaatgtaagaacgatccttaacgcaaaagagcttacgtttctcgctccccaactttgttgaatccatcgtcttgctcatgatcttcaaagcaagcgccttggcctcctccaaggtgatctcgtctttgtagtcctgcttaagcagcgattgagcgctgagagcagagcgaagcattagtgacggcgagcatttccttatatagaagtggatctcacttcgagttgttcgctccgatacaggtggccttccagccagagtagttgcccgacgggtccgagtgatacagctggaacccgtgaatagggtcatgtccaatgtagagcaatgaaacgccgaaaggtcggagacctagagtgaaagaggtggtaatgaaccagagacttcaacttgagagacccttcgagaatcgcgaatctacaaggtgcttacctccgtactgcgtgtatccctgcttcaagtcgcacagcctctgggccaacatctctacgggaatttcttcatcgtagctgaaaagatgcttctgagcagcggttcttgcgtagttgacgagcgagttggcatctgatgtgatccctgcgactccagcaaggatgttgctgcgggagcaccggttgaaaggacggggtggttgatgagcaaggaacatactggccgaggcattggcgctgtgccaagacatacttgttgagaaggaagatcttttctgcgccaccaccagtccaggcttccaatccttctcctccagagctcgtcaacgagaggtcgagcagtttaccggtcactttctgtcgtgaacgccgcatgagtcaagttagcctgcaagtcgacgcgacgatcgggaacagccaaattcgacttgctttttcagcgaccatgacaactccttccttgctcaggatggcgagcacggttccagccatagagatggcctccatcgcatattcgactgtaacgacaaaggagcgcgcctgttagcggacgcttcgatgcaagctatgtgtgtgtacatggcgtactctggaacactcgacctgaatagatgaagattacagatgagcaaggcgcaatttggtttgccggtttgccacttaccctcgggtgagaagatggtggtcctggaatcataccttcgagactgtaagaggtatgtcaatcttgacgtcgtggtgggccaaccagatagacttcctgctactcaccattttgaactgcaagtactattggactcggtgacacgaacagataccaatgtagtccgacggtatttcggctgggggttgcgtgtttgaccagaacaacgaccacactgtacccttgtatgattgaatctcggacgtcctccttcgtcatcagaggatcagagatcaaagagccaaccctcgagaggacgctcgcgcggcccacgactcgatgttcatgatgacacgtcatttgatcatattgtcgaacaaatcgagagccactcgacggacctgttcgacgattaattgataaccaaagtggcgaagggtcggaagctatttatctttgatcccggctcgcccgccgttgatcccggtggaggccgagagtactagtcggacacccgatcgaggtcgattatcaaagccagaatgcctacgaaggtcgacgagctttcattcaagcagtggtggccgaaggtactagcagtagtctgtacttctatatcatctgtggaactctatactacatttatacccgaatcatagactggtcctatttccacgcttcgaactcggtcacatcttgcaacacgacgctgtagtgatcgggcacacggaacgacgggcgttctctctctaggtcctttcggcttgcgaagccagactttcatcagcactataggttttgacaacgagcatactcccattcaagctggcaactgtacgatccttcgactgtaacttcggtcggcatgaagggatcgcgcaaaacgtcatcggttcgtacagctcttcgttttgttatccgatgacggcgcgctgtgctgatttcttgattgggtttctggcgcgatcccacgatcatcatatagagcctggccgacttctcactcggtggatttctgttcgtgctcctgttcagcgtagctactgaaccggtcgcggctcgcttcggcctgaattggccatcgaagccgcccacgccagaaacaccgcccatcagagtcgtttatgaccctcccacagactatggacacaacgacggcgtgacgccggagatagagtccctcctgcgtaaatatgcaccagtgatctacctacagcaagtttcgatcgaccaagccaccagaccttccaaacgcttatccggactcctgcaattgtgactgtttgaaaacagctctgaagaggattacttccctagttcggtggagtatatgctacacagatatgaggtgtgttaaatttcaccactgttttgttaggaaaacaatgcttaacgctacgtggcttgttcatgacagatactgaacggacgcgggctggcgaacggctcggtaaattgtcttccgctgcgcctttcctacgaatgaatcagcagctcactcactatgctgccaaatgtgatagcttccaagcatgcctttgagcagttgggatcttgcgacactccccctcgacagacaggcagatctctggctttccatgtcgattgacatgaatccccagccttatttgctctcgaatgagtccacctttctctacggcccgggaggagagaccgccgaaaagagatttttgcgaaggacgagcgccgaaggaatcgatggcgacttgatcagaccgaaagtttccgcgcctgtctatgcattccatgtcgaacaggaggacggatatatcgtgagcgccttgtggcctttcttgaagggcccttccagcagatcgattgactggtatttgctgctcacaggatttgatatactggacattttacccttacaacttggggaaaaaagttgcccccctcggtatccttggcaaccgtaagtttatggcctagagaatactctcgtcgggatactaatacttcgcaaccttccagatgtggcggattgggaggtgattactcgcattcactggatctacaaatactgctgtacttaagattttccttgcagcatcttaaagttcggacgcggcacggagaggctgtctctgctgattacagtgagcctcgcggatgggtcttccgcgatcgatcgtcataaacctcaagccgaccacctataatccgtcttagtggtacatcgtgacctttcgacgacagggttcgtcagtcgtgtttgttcaaaaagtcctgagtgcgagtctcattcaccaaaaatcgttgcagaacactgcgttgggccgacgtgccgaaatacgacggtcgaccagtagcattctcggcacttggtagtcatggactctggccgaccgctggggaacacctctacatcaacgtgagtcagcgctttgacaaaacctggtcgggctccttctcactaatgtttggcgtaaggtaggccttcaatatcgtcaagcttgtagatgttacagatgacaggggtcctgtgtgggactccaaagccgatctagtaccgatacaatggttgaatacttctgccaagggatatccatacaagcgtcgtcacgatcccaaagggaagctagggtggctaaacttcaagggacgatggggcaacaaaggagaccgatcgtgttggtggagtatgatatcacccgactgccaagtacgtcgctggtgatcattgttcggaaagttcctcgtaggactgatactctgttgttgtccttcgtcagatggccgacggacctgcgtaagtatacgccgggggagtgtcagaagcattcgcacctgatggcacaaattgcgttcaatagcggacccaaccgagaatttaggatgccgccgcaatgtgtgatcgctccgctttcttccgacccgatgacctcgatataccgtttcaaaatcgatccaccacaagtcagagcagcaaacgcccgtggcatgcggtacatcgaattgacgcagacttgttcgcgatggcgcgagacgggcaacgcgggaaatgatgcgttgaatgacatggtcactcaaggtcaacttgcaagcctcgctgctcgggaagacgtcaagctgcggagtcgcataccgttgcatcttcacgatcgagtatttgaggtgagtcaataatcagtgaacaattgctcaagatttcaacatgtcgcacaattgcgagctgagctcacaccctgtcccttcctcctcagattgcggcaaggtcctgtcctgcacaccacgctatctcctcatattcgctcacgctgttggggaatggacgttcgcggttaccagctaaatccagggacatctgcacctttgtgagggggaccacatcgggttacacgagcggaaggtctgttgtcttggatgactctgacccctggacctatttcccatggtggcgacattgaaggcacttttttgtcgttgcggaagcgttgtgaggtcaatataaagttgtagcacatagaatatagaggagcgatagtcttgcattagttgattgtacaaagctattttacaaaggtctaaagcatcggaatccgtttcaagccgatgcaaccggacgtctaccatctacatcgtttcccttcgatatgacgtcttcaccggcagcaggaacagtgccaacaccgaccttgacttcaacgccgcttgtcggacttgactgcttttcagatagataccgcttgtgtacgcggcactgcttgaaccccatatagaggtcgaccttggtgttacgttcgttcgcccacgcctcacaacgcgctaaagcctcggggacagaaacccactctcgcttcctctccttggcctcaggcctgtgtattagattcgcagcaagcggatcagcccagttagattctgcgttatgatgggactctaacgtaccagtcaacacatagcgcgcccgggtcgacctcgatctcgaaaacgtgatagtctatccgcctctcgccatcgcccgacatgctgctgccgacgtgaacttcgctgccaatgtcactagccaatatgtcctttggagtgcccgctgcgatttgtagagcaaagcagtgtgaattcccatgacagatcggttcgatgcgaattcgtctcaccttcttcccagctctcccgaattgccgcttcggcgtatgactcccctaactccttctcgtgaccgccctttgggactataaaatgggatgaatgggcgtcaggcacccattagatgatggatatcaactgaattcgtcgccccgacttacagatccatttggtgtcatgcttgcgggatgtaaccataagaaccctttggttgacagcgtcaacgggaatagcagcacagactgtcctctgcttcaaacccgcacgagacggcggggatacagaagcggacgaatctgtcatccttgttgcggtgtcggtgtgggtatacggtgtgttggtatgacgatgaagtatacaggcaggtcgaggcgtaagaatgctagagtcgcccggatggcgttctctacccggcaggaggttcggctttgttactttactgatgctgcatggtgaggtccaagtcggtcgggcgaaaagggtagtaaagattggctacgttgcacgcacacgattgagaaagcgtatgtcgcacgagcgcaggcgtagagatgtactgggtggtgaggtaacttgcttgagtagcttcgaaagggaactagcgtctccgaggaatctggggtgaagtgaatcggcaagtcggcatggtcaagttttagcaccgctctcgagaaggcaagtagaaggtgtgagtcgttgcgatacaagcaataatactctggttgttatggggagggcagccgccgttgggactagtcacccaccctctcgttgtggaccgcctagcgaagcgggagagctcgtgtgagcaaaaggtcgacgcgtatccatttcattcgggtgcatcgtcgtgtaaatcaaatgatgccgatcatccgagcctgttgccctcccctgcctgccttcgcccccacccttgcctcgatctcaaagagggaacgtgcatgggcaggccggccgaccggaccatgttcaggtattttatgggccggacggaagaggttggactttgcaagcacgctattcgctagtaatcataataataatctcactctgattcagctgatctaatgattgacatgatgatgtactcaaatcagtacatcgcgttcgccgtcaagtttcaattctcatgcctcatcttctgctcgctgctcgctgctcgtgtgcttatacgtgcttatttgtaatctgtaaagcgtgttcaaaggtcaaagacttctctttctgttggaactttggaacgtttccgaagacattccattttcgacctgcagataaataccaatatcatcgatgccttcgataacgagagaatgccataatagaaaccagggcctcaataattaataattagctggtagctctacagctggttcattcagccgcgttgcgcgttgagaagctgagaaactagctttcagcatccacaattgacatgccgctggtagttctaggcagagcggttggtcaagccagttttgcgagtcttcggaaggccaggcgatcaggtgacaaaagactacatactagacattagcaagattcacgtcgcagaaatgaatatgttatcgagcaaagtcctcttggcaccttatcgacgaaatggcagatgtatctcccgtagtggagatcacttgccgtcaacatttcttcagctgcacaagagatctcaaggcatccgtggcctgtcttcgaatgcgaacaacgagactctcttccttccgaagaacgccaagactgtttacgaaggaccttactcgaaaacgttcaagtatctaaagtacgtctcaaccaggagaatgttgttcagcaacgcgttgctcaacagcccgaacacacgaatcacaggctcttctccttatcgtctttgggtctctcggcagccttgtctcccttcatcttcattttggagtcgtcactgccgacatctgggaggatctttctcgcggtcaccgccatctctgtacgaccttgatatccggaattcaagaccgcattgctgaaatcgggtgatcttttagacaacaacgttttcgacctatttgatatccctcttcaccggaccatatgtcaatcggatcgtgcgggcgggtactgatgcccattatcctttcatgctgtcgaccaccagcatgttcttgcaagaacgcaatacctttatcagtgaccaatcgatcctctcgccaagcgaacgaccactaaccacctggaagctcaaagagcaagccgacagcaattccatacctgcgtctttggaggccgtaacgaccgataaagctggaaagacgctcggccgttggtcactcgaacagggagccaaagcgaatcagacgggcaaagtcgtaaggttagtcagaccagaagagcattcttgacatgggcatgtctaatcgacagtggtgtcacacaacctaatcaggtacttcaatgtacatccggaattgttagaagcccgcttgcgcgactagctagattcaatcagtcgcacagctcaaattcttccatcgccattcgctccacgtctgaatcgaaactgaaatctggagtctcagtcacccgatctctctcacgctgtgctcgcttgcccggtgcctgtcgcttggtagggacccttagcgtcccctcctctgtcgattttctctttgtcgctgttgacgttgtggacgtggaccggtttgtaggtttcttgttgaccggaaaaacgaagtcgtaaacgagcgacggcggtacggtatctaaggcatcagcacgcaatcgggtatacctcaaagccttggggcctgattgaatgtacacattgatagcgtctgcaataagatatggtcagacgacaccccagccgtagaggtgattcgccctcccccttacaggcatttgcatgaaaatcctcttgaaggtatcctttcaacagcagatccagcagcaaagtttctgtccgctagcagtaatatatgagcacttgggcaacaatggatggccagccatgttgagccgagcccaggacgaacctctttgctcaacgcgagctttccgccgcacatcgtgttgagatcgatactcccacgtgtctctgaagacgagcccttcttgttcgattgcgaaatgacagcgaacgcccctcctccgagacccctcacaagatcggcgaggccgcttagcgtgacccggcctccgatctttgagactgcttccgacactttcagcgctttccatactgatcgtgtcatgtcaagggtttccagttggtctccaccacgtgtgcaattgtcgcagtgtccacatcgcgaacttggtatgtcctcgatgatccgactccgcccatcggttggtgtcaatgcgctcgtcgagaaaaactgcagacgcgaaggttagcaaaagagtcctttgcagcgctaaatcctgatatcacctcgtcaaagataagtttgcgacaggtgacgaggtctagaaggcggatatgtcgcggtcagttactctgctagatcaaagtaagaggttggttcaccttgagcgtatctcagcatgtcgtgaactggagagaatggcgttttagcgtccaggagtcggttttcactacggtggtacggtgtcggcctcaatagcgcacctttgctctggccgtcgaggtcccctagggtaagggacaatattctacgcagccttataatgaataccgggagggggaagcaagggacaagacttgctcaccttgatgcatcctgatgccgatagtataatacacagtccgcgtccaaaccgtcgcgcccagctcttcctgtctcttgatagtaaccgtccatcgacttgctcatctgagatcgcaaaatcgaacgttggctgaaccctggtctcgcggtgcgcatatacctactgaagcatggatcacgtagcgggtgtcggccttatcgatgcccagcccgaatgcgatggtggcgcagacgcagctttgagggatgtagcgaatgagcgcgtctcgcatgacgtctggctgaggtcgtacttactgcagtttgccatctctccaatctctgtgaattgtctctttttggaaatcagtcacatcggcatgatagacacccgtctaaatgattccggagtctcgtcaatgaacgtggtttgacggatgtggccgttaaggtatcaccttgatagctcccttcgaagcttccatgagcccttgtgctacgacctcggtatccttcttgctgaggcaatagataattccggacttgcccctgtttacaaacactgttcgtaagccttgggccatcaacaagcccctattatcttacagatgattgttttgtatccaagtagacatgtcctctatggcgattttagcattggatgcctttgataatacgcggtaatgcaaattcttccgataaagaggcgcagagaatgcacaagtaccgctaggtttcgccgctgtccctcagattgccgaatggttatagtcgtgcaaggaatcttgtacactggtcgaatactgacctgcaccatcggtgagggcgggaagtctgagtattttgaggagatctggcaagactttctgtgatagagttgccgtctgcacgaagtggaactcaatttggcttcagcactatgcgtcaaagcgcggaccgagcttacgcaggccagtattggcactttcgggaaaagtgatttcaatacggataatcgtttgtaatcgggactggtcgatttggaatttcagtttcgtgaaccgtcatctcggagtgatcccaaggctcaccggaagtcgtgacccagagcagaacagcaatctgggttggcggaacaggtcagccaaggtaaaatcgatgaccgccagaaaccctccaatattacgagcttcatcgatcacgattctcgctagaagagcaagacggggtgaacgatatacctcgctgcctacccatcaaatagcttaccgagtctaccggaagtggccagctgctccatcacactgattaaccgtttactcttggcgatcttttcgggctgcaggtaacgtttggcatcatcatacagcgtctgtattcatcctgtaggagacatacggtaacatagcaaagctgcagaagcacgacggtaagccgagctaattgaaaacgtactgtcggctgcactaacctttacctcttgcccttcaccgtttctagagtcggtaatcatccggttgaaggaatcgttttgctcttgcttggaggtcgctcccgtcaacatcgttactcctctgatgcccactgccttcaagtgtgtcacttgatctgcgatcagcgaaaggagtggtgaaatgacgattgtcgtgcccggacttaaaagcgcgggtagaacatagcaaatggttttgccatgcccagttgccaggacacctgtccgagaatcacaatgctctcattcatatttgccactgggctttggatcggccgggggagcttacaaagtatatctcgtctgtccatgtttgcgttgcaaactccctcctggcacggcctgtgaagggaatgcccacaggcatcatcaaaatggggatccgatatttcgctcgatgggtgatataccgaaaactttgaaagccccagactcgactcattgtatgtttgagctgcgcggtccactcaaatggttcggcgggattggagtaattcaccaggatctctctcgacgacaccttgtttggcaggatggggatctgtctgatccgttgcgacgagctccgtcgcagcacctgtgcacggtccttctgtaggactgacctaagctgtcgcagagaagcaatttgatcatctatcgcagcgatctaagtcaatcgagatcagtcaagagaacgtctgcgattcataagcaaatctcgacttgcttcctcgtctagacttttcgtggcttccgaagcatctgaaggcaacgaaggtgggaggatcgctgaggctatgcttccggctgagtccgaacggccatcgaagccaccgactacctcgatcccatcgtcactagactcggaccacgagcctctcatatcgcgtcggacaccggaccaaaaggttgcgtcaggcccccgagaagctgatgcgggagtaaggcagccgaacaggtcaaccaagcgacaaggagcgcgcagttctggctcgaacgagcgatcagcggggagttgcaggagtgcagggatagaacgttcttgatagctgatcaccttacaataattgaagaatcgatacgagccgtcaacagccgacggagggtctcggtcctgcaccggaagcttatcgaggtcaagggagtaccttttggatgacgtaagccatctcaccccagcctcacgatggccgaggaatacgatcaaactgctacatagctggtagctagtcgcgtgctgtcgtgaatcgggactgctctacacattattacgggggttctggcatggcgctcaacaattttaatcgctccagctaagactcttacattgctgctgccgccttaagaattgacgagtcaactcaaccaccggttaaggctcgaatcgccctgaaactcctcgacaaggcccggttgtaaagctttgcaagctacaagcctcggtcgaaacgcctcgggctggacctttcctctggtcgaccgccaacagcagtgcgtatgttgctgacccataatacgtcatcttgaaacaccacggtcaatcgaaaaatgcttgatgagacacctatcggcctcaaggaattggaggctgactggcgagactggcggcgggccaagattgaagccagcttgacccgccgggtgacatacaaaagtcccaaactcccgaccgaggtggagatcgaaaccacaccagtgacagcaggggatccaagctcagtgacagcatcaggatcgggccctggcgtcgagcaaagcccagcctactcagagctgtattcagggaaagagacttccttccgagatcctacgcaaaaggtcgtgtcaactggagccgagcgctctacatgtcctctcacatccggcttcccgggtcgaccgaatgaacgcccaactaagcctcggcacatgagatcgtgcagacttcaactcggcgctgagcagtgccccgtgaatccacatgcacacggtgtacagctttcgaaaccagagcctttgctatcgggctcactaccaccgggtacttacccgcttcggaggcgtacaggcgcgctactggttcacccatctccgcacgtcggctcgccgaatcttgatttcgccatgaccttcctgcttgatacttcccaatatgacatcagctcggacggccgttcttgcagcattagcaattatcgatcgcggacgcgggaaagaagcctcctcgtactttccctgacgggcgattggacgcgagaagatggtgaggtatgggaacatttaaggacgacactggcgcaggtgaaaaaacacatagatcaggtaagctggtctgtagcgcatatatatggctggattggctgaaacccatgagtaaggtcaggctgtatctcgcctccatcaaggccgcattcacgtggcctgctcaaatccccctggggttgtttactacagcaatgatctgcccgtacgaacaatgaaggcgcaagtacctccacgaacgaagatcgtgatggatcagtccagcctgtcaaccacaattctctgctcgacaaagtcggtctcgactgtcaagcatgtcggaacgggatctttattcacaaaaagggtcctaaaatctacaagtagcaaatctacaagtagctacgtcgaactgagggcgttcgtaacatcgcaacaacaacagactactagtacaccgaccgatgggtggttatgcagtgaggcagaactgcaagcattaggagcctttttggatacgtatagctattggcaacaatacggtaggtctcgcttacaaccgacggcgaccgcagtcactcaagtagactttttctctaacagcatcgatctaaagtcatcttggcccttcattccctgagtatgatttggagcggttcggtcgacaattggcacagaagtgtcggtgagcggtgctaccttggctgacgggacagccaggatcttcttgcggttacctgctttcggcggtcgaggcttcattgacatgaccgaacttggcatgggccgcgctgtttccgcaggcgactgcacagtgctgtcaacatttggcacttctgagctttcgcctaaggtcacgacgtcgagagcgtggcctgcaaattcgaatttggcccctcgcaaggccagcgtgcccacgtcctataaacgagtctctcttttaatcggagctgatcaagtatgagacggtgaaacggcttacggcgatggaggcgaattctacgactgcttctttcaaatcgacaaacacttcaactttcctgatctttgccaccttctcaagagcctgctgcaataatccttcttgggttctcggtgggagtcccgtcaacttgacgctacgtgataggcgttcggcttgagagtgagagtcgccaagtgctatcgaaagacaataccgttatatctatcattcatatctcaaacaatgcgtggacatgctcacgtttttctccgatgcgcttgctggattttgccgttggatcgacacggttgactttcatggtgcgcttcttcagttgggtgccgtccatcgctaacgcaagcgctacagcagccttagattagcgagtagagattagtcgctgagtcagggttggtctcgctcgcaaactcccacctcatcagcaaattccaagaaagcaaagcctttacaatgaccttcctcgtcggtcgctagatttacccgtttgatgtcgccgaactgcgaatgaaatatggttgagtcgcgttcggtggttagcagtccatacatccggctgctcacctcgctaaagagccgccttaggtccttctcggcaacgaatttggatagccccgtgatataaacttcgcgttgttccaaattggcgtcgctcctttgctttttcctcgcgggatcagacatgaggacagatagagcgagacctggctccaattcttgcccgttcaattcgcaggcagcatgggcggatgcctacagtcgcgagcaagcaatgtttcgaagggtcttagcgaacgcggaacttgggtcaagctgctaagccgtcttacggtgctgagaaattgtacgtagcaaaaacgacgagagtctttgtacttcctgcttggccaacgggggtccagcatctccccatactgtgaaaggatttgtcagtcagtgagtcgatcgtaagcaaagaccggccgggggggtcgtccttaccttcgagaataggctacggatagactcgtcatcggttttctcagggaagttggtgacgaacaaggtggtctgaccggcttggtaaacgtggatctgagcatctccaatcatcttcttgtcttttgtgagtgctgcaggtacgctatcctatagataagaattcagtccaagcgagagcagcactacatcaagctgatgctaacccgatcgaggaattccaccgaggcagtgacggagcggtcttttagattgatgacgacttctcggatcgtcccgcactgcggacagaaagacaggtcagctgaaagacgaggagaatgacagcgatcgagaccttacgtcttcgaagcgctggcggatcatgtcttcggtcacatcttcatgtaggtcagccacaagcaccgtagcgaactcgcggtctctgcgcataattcaagttttagtcgcgctcgatggtagtcagactcatgctataccttgacgcagccgaatccggaacttccgcgtctggtggattctgcttaggtcttttcgctggttcattttcgagactagcagcggtggcctttcgtttgtttgcggggaccggagtgtcttgatgtacttcgaccggtatcggtcgatcctccgatgcttcggtgttgattgaatccgtatgaaccatcgcactctgctgttgacagatcgtgtcaatcaggacatcgagccgcggcggcggcgatggatactcacatctgctaattgccttgcgagcgaatccgacagagcggcgaccttcagttgagctgccgtaacctgctctatcgcgccgtagcattcctcgaaagatatccaccgactccatatagcttgaggccagtccattccctggcggttagccgcaactttcaacgccgacctggcctcagcgatatgctcgtgtcgtctaaggtgcgacgtttgtatcacttgagcagagattcgaccaccaagaggcttcattcgcatgactcacatcaggaactcgatatggcctaaccacgcctgatactccttcggtcggactttacaaacatgctcccagacttgtatggcttcggctaaccgtccactgcgctccagctggaggttgcgatattgtgagactggtatcgcggtaatgagagccagcttgacttacccaattgataaggtataattccagtctcgagccagagtcgcctttctggtttacagctcgcatcctttcaatgctctccctgatagtgacttcgatggggtgggtgctgtcgctgtgttctgtatgaaagcgcaatcgtcggttaacgctagtcgagatacgtcgcgcttcagatgtaccttcatcggggggggtcgactcgccctcgcccatcctgcgcatgaacccgcaccatgccatctctagtgtgactaattcttcgaccggatgggtctcgcctgtacggagattgccatgcgaaccatgtgtcaacaagcccagagaatgcgcttgtgcatacgtgtcggttatttctgatgcttccttgtgtagggcttcctatgatagccagcgtggagcatatttagcttgatgaagcgtagctaggcaaatggctctcattggcttgcctgatggcgaagaagggtcgcccaaacttcgccgctctccgggcagcaacgggtagctcttgtcaaaactttagttgcctctgctttagcaataccgttggtcgtttgctggtcgcaatggcagcttgcaatcaacaccgtgctgcaaggatgatgcaagtgctaaggttttctcatcaactcacgacaaagcggtagtacctcagccagataagggcttctttcaacttggaagctctttctgtagtgtggcttgccacctgcaacatccgctcgaaaatcatgatcacgaagaacggctccaatttgggagaatccgcctcccgagccctactctttcccttggattttgacccttggtcaggtagaccggtttccatatcgagccaagcggaaagatatgccaggcaacgatccggcaaagacgcatcggcgcttgccgtcaactcctcgattcctttcgtcaaagcttgccagccgtcttcccaaatctcgcgagcttggtatttgctcgacgacttggacgacatgttcgaggctttcaccatgtttgcttcgtagtcttccaggaagtgcgacgtgttgaacgtggagtaacgcccagcagtatctcccagatctttgacgcatcagaagtcagggcatatgtcaatagctggcccaaccagaaactggcgggcgcgcatacgattatgaggcacagccaggtgagcaatgtatctccctttcagtgcgttgagagcggcgtccctgattagtcaacaaccactaacattagcaagaaaggctcaataggacccgtcggccactcgcctttgctcgcctgtcttggtgagcgcgatcccttcttcccatccgatataagcctcccagatactagaattctgtggtcacaagtcaaatttcgaaagaattggtccagttgtccctgcgactacgtacagttgacatgatgcgctcagagacggagacggcggctttccatagatcccttgtctcctcctcgctcaggagagctattcgcggcgtgtcgtggccattcatcgaatcatctggttgatcctcggcaggtgcaacgggatgtagacgcgacaagatttcgccgatcctcagggcgatctctgaggctatgatatgcgtgggaatcatcgagcatttaaaatgtgctcgtcaaagaccacttggagcaatctgcttacatgaatagtctgacaaagctttacgaagcaaagatgcaacgtccgttgctcgctgagctgacatgctgggtagttcgtcgctaatcctgtcgagaacatctctccagattactatagacgtaatttccgtaactcagaagatgtagtcttgttcaagtaggaaacgatgtgcagtaaacatatccttacctgctgagcaaccaacggtgttcgcgagaatctcaagaccaccagcggcttcttgcgtcatctgtgcttttttcgccaactcgacattccgtctgagtaatggcacgttgctaggctcggcatctaatctatcgatcacgtcgaatagctcctggagcgtttgtttcatttcggttgacgacatagtctgatccatgactcgagccggatctcttctctgagccagacgagcttcaatttactgtagaaccgaccgtttggtgtgccactggtgaggtctgccggagccagtgagagaagatacgactacaaaggttgttataagcgatgtactggctggctggttgctgttgcagcaatcccgtgactgcgcacgactgctaaacaacatcgacttgatagttgtgataatcgtcacctttcgccgacagttgctgctagctgctcgccagaccgacccagcattagcatccgctattcaaggctctcacttctggcctgacacttttcttcctctgatcgaccccgtccacgcccctttttgatttcgatccatcttacgatctcgatgggggaaggagggttcccgatggcccgcgagctggctcggctttttttgcatccgcccgattcgcgaaaacgaacgtggcgcctactgggcagccgtataaatctccccatgccagcgtgaacaaactcgggacgatgttgtctcccagcattttagccgcaccgtcaagatcgttcatcgtacatcgaaccccaatatcctaaaccgaaccaaaacacaagactcacttcccttaaaatgcccgcttcgtacaaggtcgccgacatctcgctcgccgctttcggccgcaaggagattgacatcgccgaacatgagatgcctggtctcttggccatccgagagagggtgagctccgcccaaagccttcgtcaacgatgagagcacagactgattgaatctcttttggcatcagtatggacccaagcagcctctcaagggagccaggatcgccggttgtctccacatgtgagcctttgagcgaagcccgttcaacaaggcaatatcagtctgtacgtcttgttgctgactcgatcgttctggcttcgtcacaggaccattcagacgtaagctttcttggctgtctatccagcttgcgtggcgctgctcacttaaattcttgctcgaaccatgtttagtgccgttctcatcgagacccttactcacctcggtgctcaagttacctggtcgtcgtgcaacatcttctcgacccaggaccacgccgccgctgccatcgctgccaccggtgtgcccgtcttcgcctggaagggtgaaaccgaggaggagtacacttggtgtatcgagcagcaattgaccgctgtaagtgggctgaaggttgagcacgaccgcgtctgaactaatgcaaatcacttgcacagttccctgacggacaagctcctaacatgcttttggatgacggtggtgacctcacctccctcgttcacgagaagcaccctgagatgctcgaagagatcaagggtgtctctgaggagaccaccactggtgtccaccacttgtacaaggccttcagggagggaaggctcaagatccccgccatcaacgtcaacgactcggtcaccaagagcaagttcgacaactactacggctgtcgtgaatctttggtcgatggaatcaagcgagccaccgatgtcatgcttgccggaaaggtcgctgttgtggccggatttggagacgtcggcaagggtgtgagtcggcccgctctactacagccttttgtcgcgtcggctcactcgacccttttctgcagtgtgccgagtctctccgatcatacggttcgcgagtcatcatcaccgagattgatcccatcaacgccttgcaggctgctatgggtgagcgagcctcagctgaagaattattacagtctcatcttctgacctctggcatcatacagccggatatgaggtcactaccatggaggatgccgcccccaaggccaacatcttcgtcaccactaccggatgccgagacatcatcaccggtgaccacttcagcgtgatgcaagaagatgcgatcgtttgcaagtaagcatactccgcctcttcatgagtcgcgcttgagtatcgtttctcaccatcactctgaactatcctcgcccccttctcagcatcggtcacttcgacatgtcagtccatgtcttcgcgcaaccacgtaacgatgtaacagccagactgacaaccatcactgctatagcgagatcgacgtcgcctggttgaagcagaacgccgagagcgtttccaacatcaagccccaggtcgaccgatacaccatgccttccggcaagcacatcatcttgctcgctgagggacgtttggtcaacttgggatgtgtgagtgttgctctgaggggtaacgaacgttcggcagtatgctgatacgggccttgttggcaatcctgaaaataggcaactggccacccttcgtaagtttcagatcgtttctactcagcataacctcatattgactgtgactttccctcttgttctagtttcggtgagaatcgctgccccctcccctaacatatatatatatatataggtcggatgagaactttgctaaacatggttgcttctctcgcagtcatgtcgtgctcttttgccaaccagaccttggcacaaatcgcactctggaccaaccccgaggcctaccccatcggtgtgcagtatgttttttatcgtctcttgtaccttggtttgcccgatcgctgatcgtgcgtctaacagcatcctccccaaggctttggacgaggaagttgccaggtcccacttgggagccctcagtaagcgcatgcctccatccatgcggcgtccggcactgcattgacatcgttcgattgactaacagacatcaagctcaccgagttgtcgaatgtccaagccgactacctcggtctgcccgccgccggtccttacaagcccgaccactacgtaagcgcgatccgtatgcattgcgctcatctgttcactcattcgacttgcctctttcggcttccagcgatactaatcggttttacgaccttgctcctatccctcttttggggctgagtttaagatttttggcgcttccaccgcgtctgttaccaagatagtcaatcaaacaaaagaactccacttaacgatccccgctgttacgacccaacgatgttgaaccgttcacttcatgcctctgggacctgtcactgtgttcatccatagacgatatattatcttgcatgacccgatttgaccattcctacgttgcacactgaattacgagagttgcccgagacgttgtccagtctgctcgtttgtcctcagaccgatgccccctccggatgctaaaatgtctgatgtcatgcaagacacgctgcacaaagggagcgcgagtgcagccgtcagtcactctgcacggatcatggatcatggatcaacgatcttggtttgagcgctgacctattgccagagtcttgctcacgagcaacgggtagctcgatatcgcagtgatcaacgcgcacaagctcatacgcacagtagctatcagcgactcaacgaccggaatcgcgagtattgacagtcttggcttgcggatttgattgtcggcagcgggatcacgaccatggacatagggaatgaggaccacactggtaatcaccatcgacctcttaccaacagtctccgaaacgacaaatcaagtcttcggcccctgtcggatgccgatactcgtctccaaaagtcgacggcttccccggatctgtcctggaacccaagacacagcaacaagaccgtccagtcgaatgtctacggggtcgaaccgactgttgctggacgtgaaaaggtcttaattggactgttggttgcagttgccactgttgtcagactgtggaaaatctggctgccaacaagcgtcgtgtatgttcttgtcaggatctgggtgcgagcaacggttttactgatgtcaatcctatcgtgagacacaccagctttgacgaggttcacttcggtggctttgcttcaaaatacataagacaggtgtttttcatggatgtacacccacctcttgcaaaacttctcatcacgttagcagcgaaaattggtggcttcgatggtaatttcgacttcaaggacattggcaagtgagtgtgactaggagtacgctgcgaaacgttctcgccgatgattttgcatattggcttcgctgcatttctaggagctacaaagagagcggggtcaatgttccttacatcacgatgcgaatgttgcctggcatcttgggcattgctgtggtacctcttgcctacttgactttgcggtcactcggatcgcgaaagactacggcgactctcggcgccacattagtgactttcgagaacggtctgataacccaatcgcgcctcatcctcctcgactcgcctctggttttctttactgctttgacagcgttcttttgggtccgattttccaatgttgactataccggaataccgttcagcaagcgctggtggtcctatctactattgacgggactctccttgggggccgttgtctcttgcaaatgggtcggcttgttcaccatcgctacggtcgggctatgcgtcctgcggcaattgtggcttctcctcggcaatctcaaggtctctcctcggatctggttgcgccactttgccgcacgggcactgtgtctcatagttgtgccttcgttgttctacatggcgatgttccagattcatttctggatcttgaaccgcagtggagatggggacggttttatgagctcggaatttcaacatacgttgatcgggcacagtatggaagatactttcgcaggtaaaaattacagccagatgtccgatagggtaaagttaactgatcaacatgatttcctgctcgcaagacgtctctcttggttcggtcgtcagcattcgccatgtcgcgacgcaaggaggatacttgcattcccatgcacacgcttatccaggaggcagcaatcgtaagcttgcacgtttcggacagccacacgaactcgccccaatcaccggaccattcttgactgctcccttgcgcagagcaacaaatcacgctatatcctcaccgcgatgagaacaacctctggcgtctcgttaacgcatcttcggaagctgaaacaacctcgaatgactggaaagctttgccgatccaccacgtcgagcacggtttgaagatcaggcttgaacatacgacgacagagaaaaggcttcactcgcatgatgtacggcctcctgtcagtgaggttgatttccaaaacgaagtgtctgggtatggtttccctgggtgagccaggttgtgatgtcggtgcaagtggcgtcgtgttcaaaccccaattgcgctttcaggttcatgggcgatgcgaacgatgatttcgttgtcgagatcgcacctcaaactcgtggtggacacgataagacgctggcaaggaaaaggctcaggacactgcgtagtcatttccgcttgcgtcatgccatgacaggctgttatctgttctcacacaaggtcaaattgcccgagtgggggtttgagcagcaagaagtaggccagacatgtgcaagtgaggaatacatggattgacgacgtttgctcgctgcccttcgcgctaggtcacgtgcaataagaatcccacgtgggacaattcgttgtggtatatcgagaccaatactcatgatcatcgtgagtagggttgagcgcttcagcatatgtttggagctcatgggtcacattgttagtcggggcacacgacgagaaagtcaattatcaaaggcccagcttcatggacaagttcttggaattgcaaacggtcatgtggcgcacgaacgctggtctcaccgacagacatgcttacgactcgagacctagtcattggccttggctccgaaggggtatcgtgagttcgcgataatatattgccggctgcccaacgctctcaaccagtttatatcgcgtgcaacagaacttctgggttaaggagcatcgtcaaatctatcttatcggaaatccagtcatctggtggctgagcagtctggctataagtgcttatctcattttccgagggattctggttctgcgtaatcaacgaggctatcgcgatcttcgaaaccgtgagcctcgaccgtggctaagagtcgatcttgttgctgatcaagcttgcccttagctatcctgaggatttatgacgaaacctgcggattccttgcgatcgcttgggcgctgcattacctacccttctttctgatgcaacgccaattgtttctgcatcactaccttcccgcgctatatttcgctatcctctgcttctcggccacgttcgacatagtgacgaagcacttcagagcaaccagacggatccaggctgcattcgtcttcctactggtagcagtttatgccttcaatcactttagcccgctcgcgtacggtagcgcctggaccaagcaacaatgcgaaagtagcaagtatcttcgctcgtgggacttctcatggtgagtcttacaagggggcgcttcaacgaatcgcgtttgatttgacccgacgatgcagcggagacttctatgagaacatcgaagactactctttcaaaccagatgttctggtaagcggtccaagcgggaaggccgactccagtattgtggtgagttgttgttggttataaccgcgatgcatgctgatgagctgattttcatgcagtcgcaagccgtggagcccgttcccgatgtcttcgagggaattcgagacaggcaagcgtctgacgacaaaacttctgatgcatttttggaagaaccgctcgctcaaaaattggtgcacacatcgctccctgctgctgtcaatcttgaggatgagcctgtcgaaatgaatcaagacactcgggctccggtaggcaaagacgcaggagcagctgaacatacgggagccgaagcggctgttcgacgaggcgggtgggaaggaggtgtcgaagatcagggaggcgtaccagtgaatgaccgagagcgattcgcaccgaccgccgcaaacatcgaagtccctgtcatggttcttgacgaagaagctgagaggttggtggacagggcgctagcggagccatgaaccttgtaagatcgagcgggtcgctgtggtgccttaaagtgccatcaggttcaccataggtctcagcgctgagcgcaagtcagtgacatcgcgatatcgcgtgctacaaaccaatgtcagccccaatattacaaattgtgttgagcgtgtcttcgtaatcgcgagccttctagggacaccagatctagcacagtctgacaacttatttgttaaaacctgtcacgtttgtatttgtgtactaatatgagatgagttccgcgctggctcgacattgtcacctatgttacggtgtcgaagtcacatcatacaaagcctgaatcctagctttgaggtggacgtaacgtgtcatggcatggtcatttctcagactatctttgctccacctttcgtgccatatgctggatcgcttgctcctccttgctttatgtttcacgcctatgcggtccattacaccaacacattcaaaacctctccgttcgctccctttgtgtcatgacccggtcatttctcggactatctttgctcaacctttggcactatttgctggattgctcgctcccgcttgctccgcgtttcacatctattcggttcatgacaccaacatatttgttacctctttggagttccgcttgtaggctttgctaccaagctccaccaatcacaccattccactttatttcaaatacctctttaggacataagagaccaaacccaccaataggctttgtctccaacttcgctccgaaatgcttcacacatatatatacagctccagatcacattcctttgtactttctcataaaagtttctctctcaggaaactactatcatatgttacttctttctgaaacctattgacaagtctcgtacaacaaatccagtcccttgctcgacacctcgtcactctacgtcaatagggccgcccaactagtctacagggcagactccacaaatcaatctgtttgccaagtcaactcgttcctcttgcctctcctaaaatctacttgctccccttcttcagcccaagtgtaacactttgcttgccaaacccacccaatcacatcattctactttgtttcaaataagtctttaagagacaagcgacaagacccatcatgtcacagggcagtaccaatgcaaggggctcaacccaaggatgtgcggatcacccgcaccacagataccttgacccaaggctgtgcagactatacacgctacgtaaccctattattcaggagattacatacatacggcccaagattacattggggaggcacagctgcatagcgacgtgtctagccagccaagtcttggggacggccttgcatgcagtaagctgatgttgaagtatatatacaatgtgttatagcgtctcacggattccgcatataatgtctatgaaccgggtatacaggaaccgctcttggagcaccttctcggctgttgtgatattggctgctgccaatggtgtgtagccactccttggtaatggttgtagtcactgtgtctattgtctcttgcagatgatagatgatgcttgctgtgaaaggacgatcaatgttgcttgcataaaagtaaagtagtacatggtagagggaaaagaaatgaggtccagatggtctcctatatatactattctgatgagcatgtcctcctagtgttctgccagtgtacttgcgactaggcttgtcacgaatttgcgactcagacgcataagtgcgactcagacgcataagtgcaactccagtcgcaaatgagttgcaaatgagtcgcaaatgagtcgcaaatgagtcgcaaatgagtcgcaaatgagtcgcaaatgagtcgcaaatgagtcgcaaatgagtcgcaaatgagtcgcaaatgagtcgcaaatgagtcgcaaatgagtcgcaaatgagtcgcaaatgagtcgcaaatgagtcgcaaatgagtcactgatgtgtgactccagttgcataagcgtgactccagtcacaacatgtgattctagtcacatgttgaccctttgtgcttgagattgcttcctgcatccatgagctaatcatggcatccctatttgcaacatcggcaacctgtcagagaggtatcaagaagacatgtttggagtataggtctctatgttgtattacagtagttctgcatctgtcatcacactatctagctgtaccctatgatcatatttcacctccggaaaacgtctccaaaggctacctgtaacgataccagatcccagggagagaaaaggtgctcttacagctaatgatgtccgtcttgcagttgtctcaacactaagtctaaggttcttgatgtctttgttgaataggcaacaagggtagctaagccttgttgaggaaggtcgaaggtaaaaggtgaagaaggtgatgaaggtaagagtattgaatcttgtgtcaaggggtctgagttcccataagagaagagaaaagggatgcctttcctacttctggggactcctgtatatacaccaaagggctagtggtgtgtgtacaagagttgtgaccagagtagttgcaaatgtatgtccacagtcacaattatgtgactgcgcaaatgtgtgtccgcagtcgcagttctgtggctgagttgcagtagtgtgagaggagtcgcaagatgtgattgtggtcgcaaatgagtgatgacagtcgcatcttcaatgattacaaagtgatagtcaattcaggactcaaatccctgtaataccggagcgggcatatctggctgacgcgacgcgttgcggccctatcgaaggtgtcatccggaaaattgctgatggccgcatccgccgtaggttgaatttccgagttgccgtcaatattgggcgcgtagtaggcaagttgagaatggctgaaatcggccataaaggaagcaaaagtaggtggattgtaggtagatacattgttggctatcggctcgacggtatgcgatagaaccaaatttctttcggatccaggttggtcgccattgaatgcgtccagactgtgtagatagagagcttccaggctagcagttgttgagaaggagcgcatttgaataaaaagtaggtacggctgtaactcctgatccaatgaaggtagcggcgtgaacttcggttaggtaggacggacgtttagaggcacacggtagctacccttgttgcctattcaacaaagacatcaagaaccttagacttagtgttgagacaactgcaagacggacatcattagctgtaagagcaccttttctctccctgggatctggtatcgttacactacctccgagatggctccaaatcagacctcctcaacgcctaacacaatgtaacgtaaattcgttagaagttgcagtcatcacatcctacacatgcctgcttgttcaaggacgtgctgggagaggtcacatcaattaccgacaaatttgttgaacgttactaggagttgctcttactacttagtattagcactgagcctttcttatgcgatcacagttgacatgtgtataccataaaagcttgaccttgggacctgtgtgcctgtaatcatagattcagtagagatgttactgttcaggccattaggtagtattcacagatatctactacaatatttcaaagcggaccgcacattggaacactcccaacaggtcacgtggtaaactccaaggaagagccctcagagaggtccctgtacccaacacatagaacactcaagaggcgcatcccatagtgtagatagctgtggtagagctggtgctgcctctgttatacaaccctaggtaggagatctaaggtgcaagtcccatgtggagtaacaaggagttagccaataacaagacagacgattagcgagactcgcccgtaacagtagtgtccatcatagtccaagttcacagagtctgaacatgctctttgaaggcttgttgccacgtgatggtatatatggttgcgtgatacttgggatgtgaagactttgacgtgcatgcaggggtaatctggaggttattgacttagtcaatgtgtgctctgtgtcagatagatactactgttcagatgccacaaggcgacttgaaaagctgcatggaagattattgtatggtccagtagagcacccttaccggacctgttcacaagataccaccacaggccaacatcagttcaacgcagaacatgcccgacagcgccatacagtgtaagaagtgtggcgcaccgcaagagtggataaaggcgccgtcacagagctggccgatgatagccatacctgactttgttaagaaccaaatgtctgcgatgcattgtgccatggcagaatccctcagcaattaaaacctggttgactaattgtggatatttaatcatgagataccccacaattatacaattactcagtgttacgtgaagataatgttcaatagcagttccgtaagatgtaaggttgtaacaaattgttgcaaataggcatgccatgattggcttacggatgtaggaagcaatctcaaccacaaagcctcattctgtagaatgtacattgtacattgcacttctggcctcattcctttttccctctcatgtactactctatttctatacaagcaacattgatcatcctttcacaacaaggcatcatcagcaccaaccataatgcctaaactcagcaggtaaccaatctttgtggatctagttgttacttcacaacaggttatgagcccagtagctgtggcctaatctacactagagttagcaaccacaatcaacaccctcaactatcaggatcatcaagaggatatcactggacatacttggacaggtttatattactggaccactagtcagcatcagacttggacatcagtattcaagcagcaacaagacttgaggcaacacagacactcaagcatcagcataggacaagtcttggatatcaacaatagatactaccaacacaggctcatcagcaaccagtaggataccaatcctgactgggttggacaactacttccaatggaggaatgcagttgaagatggagcacttgtctatggagcactgcatgtgctgacagaggaactgaagggacggcctgtcagacctctggaaatactggaagaggatgggaacaagacaacaccctcttcagcaattgtctccctctacttagaagagtacagggaatggaagacctggatgcgaaaggatcagaaggtcatgggccttatgagactcaatgtctcctcaggcagcagaatggaacttgcaggatgcaatacctccaaacagatctgggataagctagccaagcttcaccggatgtacgacaggaactacaaggcagtacatagaagaaaggatcactacgctcaggatgagtgaaggagatgatccagtcaagttcctagagctgttcagcacactactgctgaaagcccagacagccaactttaagctgtctgaagaggataaagctacctatttccttagggctttacctgtgacttatgaatcactcaagtcagagtggaagtcactgcaaaggatcaaggagatcacccagcaaccaacttccacatttgaggatctcaggggaatgttcaacacttacattgctgacatcaagcgtcaggatgaagtaaggttgcagaatgcaatgatggtcaagagaaccagtcatgtgcaaaggaaaggatttggtcaacaaaggaataacaaggaccagtccttcaacaagaacaacctatcttgttggaactgtgggaaacaaggacactccagcaaagagtgcagatcttctaagataggagatggatatacccacaaacctaaaggagaacagagtaaaactgggttcaacaagtctacagacgatctggcagcactgcataggaatatggcaggtgcagccattcaagagatctgtgaaaaagaatatgctgctctggtcaaggaagagaacatagaatggcttgttgatctgggagctagcttgcacatctgcaacagcaaggatgtgttcagccagctggagagactgagtttccccaagagattcaggacagcctctggtggagctacagtctctgaatatggaggcaagattaccatgaagttaccccaaagtcaacactgtttgactctacacaatgtggtgcttatggaagatgcaccagccaacctgctcagtcagggaactctcattgagaagggatgggatgtgcagatcaccaaagatggtggcatgatcagccaaggtagcatcaacatcccagtctacaagacaggtgcaggaggaaccttgagggcattcacgttgccactacaaagattggttacttgctgggtctaggcaatagcaatggtgttacggcggagcttcgctaagtggcgtctaatgagtatctgagtgcaatgtcggtatggatcgtaggtagtcacaacaggagggaagccgagttcggctaatgggagcgaagtcggttgggatgatacgaatccgggttgatgtacggataaggaagtaatgtcgctataggtagctaggatcgaaagcttgttcagtacgaacggtgagacgcctactacttagcgagtgtcctgggttgtaacctcttcacaatacgtcttgaagatgcggtgctgtcgcaaatcagtaggcgtacatagaatgcgatattggaacttgaccttcctagtacaagaacgttgtctgccggattcggtcaagttctactaagtatatatacgaaaccgagagtagtcgtagcaggtcgagaacaataggcggtccaagaacggtgaagcgaattcggaacaaagagaaccgaattgagggtcgagagtcggtcatgtaacaaagatgaatcgttgtctgctgagtcgagatgtctttgttcggtgtagtcggttgtcaaactatgaggtctttgttcgatatccgtcaatgccgctattgttctccgctggtggtgatattgaatatgcgttgtgtcgattgtagagagggtgacaagaccgcgcgagccgaagtcggccgcgtaggaaccggatccgcgtcgcttcccgtaataaatggtctattgctggtgctgatcttaccttgttgtgaaggggaatcaatgttgcttgcatataagagtaaagtagtacatgagaggggaaaagaaaatgagacccaaacaattccctatatatacctttcaggatggtggaaaatggtggaaaatgatgactcagagctctgactcatgtaatttctatagaatccaaccatagttatctgttacgggagcgacgcatatccggcttctacactgcgggcttcggcttgcgcgctcttgtcaccctttccacaatcgacacaacgcatattcattatcgtcatcaccactattgacacaacgcatattcgatatcaccaccatcagagaacaatagcgacatcgacggatattgaacaaagacgtcttgacaaccgattacatcagacaaagacatcttgactcagcaaacaacgactcctttgacggatgttcgattctcgactctcgattcggttctctttgtgtcaaattcgcttcaccgttcttggattgcctattgttctcaactcactatgactactcttggcctcgtatctatacttagtcaaacttgaccaaacccggcagacaacgttcttgtactaggaaggtcaagttccaatatcacattctatttacgccaactgatttgcaaccacacacatcttcaagacgtactgtgaagaggttacaatccaggacactcgctaagtagtagacgtctcaccgctcgtactgaacaagcactcgacactaggaggacatgctcatcggaatagtatatataggaaaccatctggacctcagttcctttcccatcaccatgtactactttacttttacgcaagcaacatctatcatctgcaagagacaatagacatagtgactacaaccattaccaaggagtggctacacaccattggcagcagtcaatatcacaacagttaacaaggtatcgtaggtcgtcgtctactactggtgtatcgtccaatatcgagtaatgtctgtctacacatcacccaatttcaatggttgtggacgagacatctgcgtggtcgtctgctacacctaatatagcctcggcctatgtgcatcggtaaagattgacatcaaggaagcaaacatagaaacaagagaaaattcattggtaatgccagcaaaatctgatgatctatcgcaacatagcaggtttgtgtagtagacacataattgcatgtggggaatgagagacttctgagtccagttccaaattcatcataggtagccacagcatgccaccgattatatcatacacggtggcaacttctctggagtacgccttgtaatacaccaaaacaagtcccccagaatgggtgcaggagtttgtgccatgggatatgggaatctgattgacgatcttgctatgattttcaagggtgcccccctggatgggcaacagccagcaagatgcaaagcggcaagattcccatacggaccatagttggggggcgtcagaagataggggaggagggctgatgttgccgaacatccggcaacatccacaggagtcgcctgtcattcacaagtgtgccgctgatactgttcgtcatggctaatattggcacataggtcttgactgaggaagaggagggggttgggcaggggttgttgtgaagatgtaagagatatcaccaggtaaggtatgtgtgctagagtgacacaaatcttttataagctctggtgttgtgcggtacagtacgcccgctttttttttgggccaggccctggctagcttctttgagttccaattgagacttgcaccatagaatccctacctgcgattgtgccacagatgcagcactgaccctactgcattgactgacgtgataggatgttcctctctagtgctctatgtgtcctgtccaaggaaagcttcaagaacttctctctggaatctatcacatcatgtctctacaaggcggtccagattgacggtttggcatggcagtctgagtaggtatttgcagatattgcctgccggcttgaacagtatgacacgactccttggttgtcaaacaatcttgccctgtgacagtctgtcaattgtcttgattttactactgatagatacaaatgccctagacttccattattgcttatacacacaatgactcctagctttactgctgtcccgcttacttcaccagtgagaactttcaatgagagcttccaagctgacacaataggacttcctacagtcttttgccgccagatttgatgcagatggtacatatcctaattgacaggatagagaagtggccacaaggaggattgtaaatattgcaagtctagatgagatattgtctactcaatgttgtgttgtattgcagcaaaagtcagtcatgtctgctgacttgtcagatgacgatttctaaggtcaagctttgagataaacacatgtcaacttgggatgcacaagaaagagctactgcaaatccgtgcgagtaagcctatgttacgggaagcgacgcgcatttggcacctacactgccggcttcggctcgtgcgttcttgtcaccctttctcgtcaccttctctcgtcacccgctctctgctattgtcatcaccactatcgacacaacgcatattcaatatcactaccagcggagaacaatagcgacatcaacggatattcaacaaggaccttatagctcagcaaccgaatacatcaaacaaagacatctgactcagcaaacgatgatttatccttgactaggtgcctgactctcgaccttcgcttcggctctttgtcccggattcgtcttatccgctcttgggtcgcctacggttctcaactcgcgataccactctcgtttttgtatatatacttagtagaacttgatcaaatccggcagacaacgttcttgtactaggaaggtcaagttccaatatcacattctatttacgccaactgatttgcaaccacacacatcttcaagacgtactgtgaagaggttacaatccaggacactcgctaagtagtagacgtctcatcgtttgtactgcaccatgcgctcgatcctagtcacctatagcgacagcacttccttatccgtacatggacccggatctgtactaccccaaccgaattcgttccatctaaccgtattcggcttcgctcctgttgaagactacctgtgatctgtaccaataccgctcagatattcaaagatgcgacttagcgaagctccgccgtaacagcctagagttgtactactgatgatgattttgccggtatcattattggtctactcttgaagtgttttcaagtgtcacagggcgagttcggatgctgatcgcctgtaacatcaagtgagtaggcatatgttaaatatgacagatacaattggtctctatactctacagaggttatgcgactttgcatgacttctaatgggtcaggctttttttttggacattcactctatggattactgtaagcagagttgctgcacagaaggttgctgtcaccaggggaacaactggcagttgtataaagctacaaatcagcaccagagcaagtatgcgagaagacaagggggatcgctagcagtcaaatagcaagaagctgttatagcatcccgctcgtccacgtagaacctctatgaaccatgtcctgtagtgagcaatacccaaatatcatcgggattgattttccccttgctcacagacttgctcaaagagcgcaaacatctggttgtatcctgctgtcaatacatacgattcgatgtggtgactgccggcatgggccgtcacgactaagagaagctctcccattcatatctataatcatattatctttcgccttggctgaagcgcaatgcaaggggcaagattctgatcaattacgtgcttcgctcaggtcgcgcttgtagtaccagaagaacgtattaaaccccgtttctcgaggacttgtggaaggagttcgatgataaaatcttcatcaccatcactaggtctatggcttgctctgaaataagttctatcacaataataaaaatgtcaccagggtatggtacgcatagtcaaatatagaccagttagctagtagccagtaggccagtagagtgtcttcgcctgatcgagatgcatgttgcgatgatgacgcgtcaaccaagcgcgatcaaacggtcgcgactaaagcagtagtactcagatactaagcttggtggtccggggccgcaactgagtcaagtcgtacgaatcaacgagtcagactctctctcgcatcccaagccagccacccccttcagaggtatttgcatattgggactgtggccttggacgacttatgttctatgcggagcagcggtaacggtacatagcaacaggcattactattatcggcggtattatggtcgcggcttcgtccgtgagtaaattatgaagctgtgttgacaacctggcctatggtttaattatccgatatcacagcaatggcgtcagttcaacttttttgagtctgtcgcggtcaagtccgggcaagatggcatctcggtgcttgaagccgtaagtgtggtgtagtatcggtgtacccgcatctttgagctttggctgaccgtctctgccaattagctgcacgccagcccaccttacattgtggtcagccccgactccagttctcctcttgcgccggtcatcggctgtatcctctgcgactcccggggtacaatatatatcctggacaagaacttcggcgagcttcggcgatggcaagcttgggacatagacgggtcctccagcctgtctgaggacgctggcggttttagtatcggcctcggtctgaccaccaaaactaagaggaggcacaaggaaaaggggcttatgttgctggaatgtggcgggcttctcatctcaatcggtgtgagcgactaccatcccgagcgatcaataaaatgctttctcttgttgacaaagattacctcaatgccggccaggaggacgattcaccaacacagtcgcagtttcctattctacgaatttgggatctcacaactacccgggatacattacctgacaagctgcccgttttgctaagaagcgtgcggatcggcaccggcgggagggggtatcctgtgagtatcggacggggccgctgcgatgcctggacctcccagcacccgatgcagccgctcgctgctctacctcatgagttgacctgtttccgggtgacttctctacacaggtatcatgccttgccgtaactccgaccttgtcgtaccttgctatcggtctagtctcgggccaagtgctcctgtatcgacacttgctgcaatctttgcaaacttctccagctgcacattcaagctttccaaaagcaagagtcgcttgggagggtacggccgccgagcctataactggtcttgggtttcaattggctggacaatcagagtccgacaagccgcaacgtctgccagcgacgcaagtcgaaaaccctgaaaaaacggccaaaatagataccgtcggccttttcatcgtaacgacaaatagaacttgtgtgttgccggtcatatccgccaaaggatcagagcccaggtctttagaggattttggcgcaccccttaactgttccatcatggactgctcgaaccgctatctcatgatcgcacgggatgatggcatttatacttatggcactgaatcacgaagagcttgttacgcttatgagggtcagtgcctgtgcaatatctcagcgattgcaagacgctcaaagatcttgttctaggggccaaggccagtatacgggctcacgggggttccgtagtaatggtatcaccgcctttcgttccggcagcaacttcttattcggcgacaatccgccgatcggccgcttcgggaccgatcaattctatacccaccgcagctaaagtaacggtcttcgatctcgacaacaagtttatatcgtacagcagcgtccttgctgcaggggtgaaggaggtatttggaaaccatgggcaggcattgtatattctcgatggagaggagacagtgagttccttcgatcttgattacctgcttggcttgcgactaagctgccatccttcagatactgaaattgacggaagcatctatcgaagagaagctggaagcgctcctccgcaaatctctgttccagttggcgatatctatggcgaaaacatcccacctcggggcctctacgatggccgacatacatctgcgttatggcgatcacctctacgagaagggtgatttcgacggctctgtagcgcagtaccagaagacgctcggctgggtgcagccaagtcatattatcaggaaggttcgacttagcatgctcaccgaaacgccgaagcgctgacgcgaacgctgacttcccaacctgtcaattgcagtttctcgaggctcatcggatacaccagcttacgtcgtatcttcaagagatgcacgcgcgaaatctcgcaacgccagatcatactacacttctcctgaattgctacgccaaaacggccgacagggaacgtctggacgcattcattcggaaagaaaccactcgaaccgtttcggatggtctaccctttgacctcgtcactgcaatccgagtctgtcgccaggctggttttcacgagcacgcgctttatctcgcgaagcggtacggccggtatcaggattatcttaggatacaattggacgatctggatgacttcgctgcggtgtcagcgttccttcacactctgcctctagaatcagtcagttgggtatgagagccaagatgcttcgatgcagctgaagtcattctcctaaaatccaggtcgcagaaattatcgtgccacacgtccgggacatgcttctccgtcatccgcgggctacgacagacctcttaatagagatctgcaccgtctggaagacagagctggctagtcagaaacgagctcaaatgctgtacgaagccggcccagcagcaccgtctcatgcggactggagtcagcatctgacctcgttcaaacctccggtagtcttggaaggacccgatgattcgcacgagctccacgcgtccgctaagctggggcgctctgacccgaagcaattcttccctgacttcgtggaccagccgagccacttccgccggttcttggaaagcgtcgcagacaaacgatggaatcagcgaatcgaaaacgtaacgcctcggcaaggatcctatttacacaggttgccaatcgccttagatcctgatacggacctgaagataggagaagacgcacagcaacaagcggtctggaacacacttcttgagctttacctcagtgggacggttttagatggtggtgaaaaaggacattctagcgatcgagatcaagcgctcgccctgcttgagcagatcgaccgactccctctcgatcctgtgcacgctctcatgctctgctctgctttcaaattcgagtcagggttgatgtgtctttgggaacgcttgggcatgtacgaggaaatagtgcggttttgggggcaaagcatgggcagtgaaaaccatcaggagcagggctcgcaggccgttacctctgctgcccgcatgctggaatacctgaacatctatggcccaacgcaactccaactgtacccattggtattgcgttacatcacaagctcggcgaatacgctggcccaacacactacagatgtttgcaacatactcgacactatacaacaggagcgaattatgcctcctctcgccatcatccagctgcttagccgaaataatgccacgaacataggtgtcattaaagattggctcaagaggcaggtcagggacacacgcctggatatcgactcggtgagtgtgatctgcattagataaaggacaagactgctgaactctcgctggtgctggccctctgccaggacaagcaactcgtgcactcatatcgcagcgagacagaagacaaactgcgagagattgccagtttgtcggacgccaaccatccgcaggttttccaggtcactcgctgtgcttcatgtaacggtcagctggatctgccaattgttcatttcatgtgcaaacacagctatcatcaaaggtatgttcagaggcagtacatttgctaaagagttccgcacactgagccgcatcctcgtctctaggtgtcttcccgatctagacccagaatgtcccgcctgcgcgcgccatcacgccctcgtccgcgagatcagacggaatcaggaagcttctaccgaccgacatgatctctttctggcagaggtgtcggaatcgctggatggcttcagcattgtcgctggagcattcggccgaggtttgcttaattcccggaagaacgaagctacgacatgatttatgctagcaaacaatcttacgctgtgatattgaacctgctacctactcttcgagatttcagtcgcgacccctggattgcgttgactattgcagcttacgaagttcaatgtatctgcgacggcgaaagggatcgacttgttccaaacgagacagccatcgctcgacctcgcttatgattcgggcctcgtcttgagatcctttgccgagttgtagcagtgaataatggaccaggctctccaatggcccttcaattcgcccgctcacttcagcacgcctcgactgcatccttgaattccctatgggctgtcagcttacacttggcgtccggctctatattcaataattcgcgaatattgtcgatttctttcgcaagtatgaattcgtctcctcctgtcgatccagtatcagtaagtcctccccctcaagtcaccgctaagcccggacttgccatcaccaatgagccatctgtggtagagccagcctgattgatcggccggatcggtccaaagcgcctgcatgaccaactcgaattctaggacgggcatgtacgggatgcgggtgctcggttgtaagcacaacgacgacgaacacggaagagccagcctcacctccttgcctcataatctggattgcggcttccctttctggcggattgtcctggggcatgtcctcccagagcgcttccagtaccttggtccgctgatgccaggctgagaagttggaaaagtttccctcgatcttcttggttgtgtatttcagttcgggacctggtccacggttcggaaagccggagcttagaatgtagcgtctgtagtcccatgcgtggactgggtaggacaagtcagcttcgacggatctcaacgtgtcagaacgcggcacttgcaattccgcgcatctcgctcgagcatcttttctaccaagccgagctcagcctgccaagcctcccctttccagtctatagtcccttcggtctgagttggaatgcgttccaaacaccattttcgatgcgtccagatccagtaaactttgggatggactttcaagtatgataccgtcaacttcagatcctgttggaggattgacatggcgatttcgcttggaaccggtcacgagattaggcttggagggtatctatatggttcttggatctcaccttcgtaggagacctttgctcatgatctctctgcgccagttccagattgtatagaattcgggattgatgtccaggactttggtggtcaaatcatagctgtcgagcgaataatcctgcgccgacctctacaatgcgagcgcacgctaagaaaaagcccagcttgacagaaaacctcatactttgaatataccttgtgccaacactgccgtaccaactcggtgtacacatcccgagttcgagcttcctcctcttgctttgatgcccgcagcttgggatcgatacgcgaccgcttgactccgtgctgaggagcgtgacgacgactttcaaaacgtttattccaaagtagtcggtcaatgggtactgaccatggttggcagagatccctgcgtaacgattacacaagcgatcagaagtggttctcgttgaaagcacaatcgtatggtcgtatgttttcttgcaatccgtatgctttgaggtgttcatatatatctcaattactcaattcctgcacaactaccacttgctacttgctgtgatgactcatcatcaagccaactcgcaccatcgagcgcccgtgcatatgcacaattcgctttaaaaagaagcgagcaagcgacaagtgtacacaactacgtcgatcgtttctagttctaacgttctagtgacatcggcgacgcacatcgagtttcggtattattcgatcgaccgcaataaacatcgtataattcgcccacatgggagatacgggacctgaagacgacccagtcctcttgtcccattgccgcacactgaagataatttgccgttccatcgaagctttctgcgacgaaatttcaaaaaatgcctatcgacctcctatcctggatttgaatacaaaatattccgagccggaagtggcaggtttgacgaaatttcagggactctgcggcaaagagctcgctcatcatgaatatgtaagtctctcagcttgaccccgctcatgagaccgatgaatgatcgttgtctcgctataagcttttgaaagccagcggctccgtaggtagtctgtcaagcaatacacccttcctcttggccatgtggaaggaagttttgtcagcgcctaagcccgtgatcgctcttaatcccagcgtgaaactagcggcaggactccccaatctcaaattcgatgtcctttctgcgaacggtaatcgttggcacaaaatcaatacgtacggtgatcaccccaagcatggcgtcatatggactgaagctgtttctctccttttctgctttcccgttgcacagggtgaaaatgtcgcgtttatttgcggaattacaagagctcgaaatcgtcgcacctgaagaatcagcatctcccgacattgctgacagtaaatggcaacaagtcagtctcgtgcggcaatgcttggatttacgcacagccgctcggaatcggggtgcaggcatgaaggacataccttctttgacctatcgattgacccgcatggatgagacgtgcgaggacaggcgcatacaggcgttgtacggaatcatccgaggcttagacgtcgaactacaattcggagacccagaggatgctgcagaaagtgccgacaaatcgcttgcaccgagtcacacaattttgtcgctggatttgaatctggatcttagccttcttatcgctctgatctccgatatcacgcatgcggatctacccctctctgacgaagagactgaagcccggtaccaaccgatcgctagggtgtggaagcgggctacttcccgtaaagatgggcgcctcatcgaggacagaccagctatggaaggagagcttgggaccgaggagcacaccagagccttgacgatgcaattgcgacaagaaagccgatcaggactagtggaagagctcactaaagccattgttacagcgtgcacactccgtcatgtctctcctagtcgtgtacgattctggacgaccagggaagcgatggaaagatgccatgacatcgctcgcaaaatagccggccctcgcgaggcttaccgagcgcggcacatgtttggccaagacggcagggcagacgcactgtcgccattctggcgtggatcccgccatcagcctgtcttgcaaccgatgcgttcattcagggtcggtatattagaagacctcatctcacccgaccttgctccacttccacctcgatcctttgcccgacgcatggcatcgacctgtctctacatattgggatcaggggaagttccgtcttcacaaacggtgccagtggaattatcgaagagcaagcccactagaagtatgccgcctagacccaaagttccctccgcgcataccacaagaagcatgctcgtcggggccgttcgcggaatgactaccgtgacagcaaatcgaatgagtgtcaaacagatcgtgcgcaatatgggtctgcagggattagaggagcagggggacctcgcatcattccttgtcgtggaacccaagacactggctgagcaaaagagggcggatgggttgtcgagccagatagacctcgatgtggatgtcaatgcaaagactgctgctttgtgggttacaacgccgaggagtctttcagagacctttcaatcttgtaattaattgtattcagccttctggaatatgagcccgtaagcttaatgcgctagtgaagtagcggtgcaaggcggtctcatcacgtgatcgggctcgccctgtaccgacctggtaccgggacccgccagacagactggcatagattcaagatgtaccacacgttcagcttgcgatccgtcctgttctttagatgtcttgatcatgcttgccggaatcgctaatcgcagtgcataggtggaaagcacagaaaaccggtggcctaatcatggacgacaatgatgccttgatctcgaatggtgcgttacgcgtgacttcggtggatgctatactacctgacattgtcgcatttgcatttcatatcggcgttcgagggaatgtagatgctgcaacagaacccactctcactagtgaccagctcgaaagcctacggaggagtctgtatgagagtcagccaggacacaattctccagtgaacgcaaacggtaggcgaaaaccgaaacttccttcacaaaactgtcgtgccgacatgcaggctaaaccatgctgtcgcactttcagacgcgcggcaagctctgcttgacaccctgaccggagcagttgttaccactgaagaaactgccgatcccgaatctggccaaaatgccatacaagaaagacgtggtgcggatcttacagagcgggagcctgttagcgtagattcagtatatcctgcacaatatgaggttggatcgcctggagtagatcagctccagcagtaccccgaagatgtttctttggatcaagcacaaaagctgtcctcgatcagtcatactctggaacattcgaattcggatatggacatggaccagcttcgtgctgaagtcaggcgtctcaaagagcacgttcgccgactcgagaacactgatggagcaatggctgcggcagccgcccagaccctcggccagcttgctgcaatgacctttccgggaggtatcactcccgagcatcctgacctcgatctggagcactcccacagtacagctggaccctccaatcctggcaagagtcaaagagctgttgccgcacctggcggcgactcctccgaaatccatcgcaatgaaattgagcctgtcccgcgccaagtccgcaagcgtaaagcggtcgacaagacgaccagggtcaaaagggaaatcgtccctatgaatgactcgacaggcaaacgtatggttataaaagagaggacggatcaactagctgtatgtgtcagatcgtgccttgtaataccataaagccgccgaactgattaccagttcttatacagaaggaaatcaggagaaaggtaggccttagtcgagatgaaaccaggcggccgagttctgataatacggcaatgagtctagatgcgaagtctctggggccaaggtcctgacgaacaaggtccattgcctggaccagagcaaggaggcccagattggccgaagggccatcgtcaccccgacaatattgctgtgagatccgtttccgttgcctccttttaccaaatctgttgacgagtgcacaatgcagttccaggatcacgtcgccaccctggtcttgcaggacatacagctcaacttacacccgacttccattccgtacgcgcagcagacgttcgaagcttgcagagtgggtctagtccgctgccaaaaaaccggtcaatcctgatcatctgtcctacggtatagagcgctgcagggacagcattcctgaactttgcgaagcgctatagcgcacagatcgatcttggcgcgaaagagaaaggggcaagagacaacaaaagaggcagaagatgggcgagaaaggacttagtatgttgatgtgtcagactgtgatgggcatgaccaggcctgacgattcgagggtgttgatcagaaacagaagaagcgttccaaagctgcagctagaatggaagaatccatcagtcagagcctgctgtgagtgattttgacgaaacacacggcatttgtagcttacatttcaaaattcagccgtatggactatatgtcatccgaatgttcttccgaaggggatgactatgacttggttcctggggaatggcaaagattggccaatctggccaggaccgatcagagcgggcaggttctagaagccgagaaggttctggaggtcaagacccctcagtggcgaagtgcggaggtgagtaagtgtctcagagcgtgaattcctttgcaaaatggctgacgtgcagcacaatcagttacaaagtctctatgataggattgacgttgcagcacagcaaatagtcaccgaggccaaaggtcgcggccacgctgccgcacctctgcacaggtttaaactcgaccctttgcgccagaagcgcccgccgagtgacgttgagccgtggatgttagttgatggccaaatgccggacgaattgacactgccagtacctaagcgggttaaaatcggtcggcccaagggtcggaaaaacaaggtcaacgagcttggcacgcctggaaatgatctgcctgagcataatggcgggactagaccgaaaaagcgcaagcggaccacccgacatggagaaggaaattatcagccccttctcgaagatttgaacgataccatgacgctcaaggtcttgaaacgccatcaaccaacgcttgcgtcggggcattccgctgatgttatggacacaaatgatgatgcgggacggactctcaacattgtcgctttgccatcgaccgaggatacgttgatcgatcccgaaatcgagattgctggaccttctggagccagtcctgatgccaaccgggtacactctctacacggctcgcctggtttacacctcgtcgatctgaacatgatcgacgcttccgcttcgcacaacgcagcttccggaagtgaagcgacatatcccgccgagtgggccgatcaagccacaggaggctccggagatatgcaggagcaaggattggagtcaagaagtgacacgcgctcagatttgcaagactatctcatgcgcttttccaacgtagtcgactgaatcaacctcaacgatcgatctctcgtttggttgtctcaatcccgatcccggggaaaaaggcatcaatagcgtattcgtgatcatgatggcgttttgcgtgtttccgacagcaagatgggtttagtgtcttttgcacagctaagaacgatctggatgctaaggttcggtgtctaaattgtatatctgtacacgtatctcccctccggcccctcctgagctcctgagcgatcgatatacaaaatgctcccttccatcttgcactattgcgcatcgtcgaactccgggcctccttcttctccgtggggctcagatcccggcaccgatcggatgctatccacctcgacggcccggggtcaaagagcccgctcaaactcgccgtcccaagatcatcagtcgctcagtcagtcgatcacttcagtgacatctgctggcctgctggctgccggttcagctggtcgctcctgatattcgccgttcggacgtgattcatcaacatcctgaccactacaatcacgctggagaacactgcattccgtataggttcgcttggtccacttcagtgcatacgcaatccccgctctcctcttgagaaacctctgagcggctgtgattagtctcttcgtctgaacattcaacattcatgagaattcgttctctcgacaagagggaaccaatattttcatcgaacgaaggctgagtagtatcttggctacaacaactatgtcctgaaccgcgcagactggaaacgacgcaacgaaaggcatattagaaagctcatatacgagaccgacaggaaggagagctctcttgttgtcattgcacaagcatgtcatcattcagaacatccttcactgcaccgagcaaggaactggatcaccagggcaacaagaaggctaagcagcaacaatcatgcgatgcgtgcaggattcgcaaggttaaatgcgaagcgccgccggaagacggcgtagatgacagtctcgggtttgataaactgaaatccacatgcaagcactgccttggcgtgggtcttcagtgtacatatgagtacattcctaagaagcgcggtccgccgaatctgtgagtctggacagcctatcagattcccaatcgctgctgacccgttcgtctgcatccgtcggggcagatacgtcaaacggctcgaagaagccaaggcaaagggcgtggtcgtaacagagatcgatagcaaggttaccagaacagcatcgagaagccgccggacaaagccaattcgaagcctctcgacgacgagggaagttatgggcaagtcggaggactttgattcggagcgaccgggtgaactcgtcactgggaacgatgaagagggctacatggaggacgagaaatcgcacaactcggcggccgtccaatacgatctatttactgctccccctttcgagaaatcgactgcctcgcaagacagaacaggcggtaatcgagaccaaactgagagctttgagcgtacgccggtcggaagtggcgatgaggacgatggttttgctggtcaaactggagccatcctctaccatcgaccggcacacagtgacactccatatctgagtggattaggaagttccaacatgtccgctcccggtctggaagactcaacgtgcgacccctctctctttaatggcaggtctctaacggagactcgaccgttcggcggaccatctacagatctttctcctatgatctacgagcggtccggtttgaagtacgtcgtcacaccaagtgatagcggttcgatactcggtgccacattttgccaggctccaaacccgccagaagggatttcatacagtcagaaagccgatgcgggcccgagtactactggatcagagcacatatcgcttcctatccacgaactacaatccggcactctaggggaaattggacgtttttacccttcatataacgccacatacacctctccgcctacggacttcctcgcatctggatcgcccaatatttccagtctgctcaacccggatcctttgagtcgtgctgcgatactccctcattttccaccgctgcgcagtccgattgatgctatactgccacgtccactcctacaccttatcatcggccttttcaaagatttcgtctatcctctcacgccatgtatacacatgccgaccctcatacaggatctcgcaagaagacgagagatggagccaggtcaagaagaatggacggcgatggtccttgcgacggtcatgagcactgtcgttcaagtcccacgcgcgtttgtacctctcagccgcggagaggtttctgctttagccgagaggtgttacatggagacgcgcaagtggagtatgtccggttactccgatgatagtctcaccgtcaatgctggtgagtcgcggactgatcacttatcgcaagattcgacgctataatctgcgtcaaaacagtcatcgtaaattacttccgagcgtgagtatgacgcccgaaatactgagcgtttcgctgtcttgcgtctgctcatggctgttattcacagagtcttcaactatgtccgggaccgtagtgtatcgtcgtgtcatgcttcactcttcgaagcacaggcattggccactgttctgaaattgcacgaagaagaggtaagcggttttcttccggcactaaccatcaaggaaggcttaccacttgaattcgtagagctacacttttctcagtgggtccgagggacaatttggctgatgtggcgcttcaaccaatcctcacacattccaatcagatccgattgagcgggagatgaggcgccggattttcttcttactcttttgcgcggacaagtcggaatctgtactgcttggtcgccctgtcaagatgcgcgaggaggactgtttcagtcttagactgccagaggaattgtgagtcgggcttgatctgattagtggcagcgatgttaagatattgtgagacagggacgacgaatacattacagaagccagatacttacagcagccgagaggggtgaccagccttatcaccggactcaacgcggccattcgcatatactgccgtaggtcatgcgggggagggtatgggtcatgctcgaaggacgtctgattatggtggcttgactagtcatcggtcgcaccctcacaaaatggagagatgacaagcgcactagaccaacgggtgctcgacttgacgcgagaatagaggaggtagaccggctcctcgatgaagtcatgggtataatgcgaggatgtccaccagaattgaaactccgggccgggatggactccagagtacaaaggtgagtcttgcctgtcatttttcacggctttgtacttcccgtttaatcagtggcttttgatcagtccaagtcgcgagttcgctagagatgcggagcaagttctgcaggagttattctttgatcctaaagcgagcagagagtacgctcgtgacgcttattccgtccaggctggtaacatttacgtcaaccaggtacgtcgctgttggtagctcgttttggttcgagtgctcaaaagtggacctcactgtagcaattggccaggttcgttctactacaataccaaaatgagctgattggtctcaagaatgcctacgaatcgcgcgcaacgaggcccattggaattcaaagaaacgggtggatcaacgctgggggcctctcaattggcggagtggtagccgagccttcaagtacggaccgtctcaccagcgaagcaccgaacgcaggcgctgcagctcatctggcagccaaggaagaaacattgttctacgacctgttgacagtgttacacaggtacattcgaaagtctgtgttacgcacagcttcagtcttgagttgaccttctacttcatggcttcacgcatcagcattcctatacagtgcatcgctgtcaacggtccctctctggtcaactctgtgagatacatcgcgtcggcacttctcgataccgtagccgtgaattcggaaccggaaagtaaatcgtctcacctcgatacggaacagagcaatagcgtcctgagagctcagggatacttgatcgaatttctttctgtactttccgatatcgagaagcactactcttggagcgatgttggagaagacggacctttatgaaaccgctgtgctggtccctcggtcatcttgtacttgcattcgtgccggcttgttttatgcttatctgttcgatttctccttttcacaccgacccaaaattcaaggacatgttcaccacagtgacgcgttcgcagatgccaggtgtaatatgaagcctccaccttgatcatgttgcacgctttgatgaacgattaaatcaaaaccttaatcgagatgcgagagaaattgcgcgagcaattcgagaaaccatcctttggctttattgtttagatgggccgcatgcagcacgaaaggaagggttcgctccacaaacccaccagttcctttttttgtcctggttcagtttgctttcccaggaattcgatagcaaagcatacattcccatatgccatatgaccctatcattccatgatcgcacgttgcaccttgcaccttgacaatacatatgaaagagatgaaaatgcacagagacagcctcgcaagagcgaagggctactgagtcacagacaacggaaagattcatgatagcctgcaccggtaatttgcccagtcgcctgccgtgataccgcccataaaatttgaatcgagatcgaggagtgtatcgaccatgccaccgacaatgctcaagtgagtcgctatttcgatgagactcagcgagggaatgatatacgtgctgagcctagtatatcatcgcatcatgttgtgcaaaaacataccgatcgtcctcagcattttggacataacagtgcgactcgttaatgttccacttacgaccacagctaccggacctgggagagacgatctcggtaaacttccattggagcaatccatggcaggtcatatcatgcgtaccttggaccgcgcggcaaccgagtcatccgcctttttctcaatcaactcaaacgctaaagaaataacactatatgctgcttcgggattggtcgatcaagtttggggacgcacctcggctatggggtactatcgcgaagatggcttgcagatcagccgaagcctttggagagtctttcaattagaatgtttcaacgaagatggcgtgcaagacggcgagtgctagtggccaaggcaagcttatctgggtgatctgctgacccaaaaatcgcctgcagctgtcgcacatatcgcccaatgtctagctgatgcagaaatccccattcagtatcaatcatcgaatctggcggaatttgtcctcgttaaggaaacccattttctccaagctttgggcatgtttcagcacacgggcagtgagctgcgagcaggagtcgagtcgcttggacaggctgtcactgatatacctcttgcaatgcccaggctgcatcaacgattctgtcactgcgttatcctggacagaattgagtgatcaagaagacttggaattatcagtcgaggcacatctcgacgctcccatcatttcgcacggaatcaggcaggatcttcagcctgtgtcacaacgtgtagcgccaccggtcgaaagcatcaagccagtgagtattgacggcttaagaccgcactcggtcaaggttcggctcatgtagctggtcgaacacgactgggcaagatggactgactccagttcgcgtctggcagtccgttctcgatgacacggcgaattgcttactgaaagaggtaccagtagatcccgccaccggcgcagtccgtcgcggcgcagggtcgttcaagttgggcactcagaatgccaacccaagcttgagagacgcaaagcacaagtcttgcccagggcatactatcatcccggatagtgtggtggtaccacagagcgcatgtgcagttttcaaagactcaagtaacttgaccttgatcgggctcaaccgcgaagcagaggctctatggcaataccgcctgactcaattcctgtgttgtccgggtgatttctcgacgaatccaaccgtaacagactataatacggagccaggaaatgtatctacgggtcaggatggcttgaaagccgcggatgagacgccgggtgctagagaagcactccagcagtgtcaaaacatccgtcctttcttctcctacgtcagaaccacagaaggatccagccttctcacagatattgaagtgctgaggaagatgtttcccgacgatgacgaacggagcttattgatatacaacgaaaaagacatcagcgatgtcgagatagacttcggaagctatgatataccctcaagtgtggggtggcgaagcgaaacccatggagccgcctcccaaatcacggtcaccgatatgcaggcacaacgtcatccctcaaccggcgtaaagagatgcatacggatagatttaggaacgcttacagatggtcaggataccgttcatctcggtgagccgcaaaacgccatcatgttgagcgcgcatctagcgtacaacaggagaattgcgctaaatatgtgatgagcttcggaccggcagaccgctctggggtattactgcgaatcagccgacagttaaggaaagagggagtccggatgctttagtaagagtcttgtcggagaccttttttggcttgatttgagatggcttccactaacagtcacgcacacgattagcatctccacatatcactcggctaatgttatcgtaagcttgtctcaacaccatggcttcaaatccattgaaaacgttcttggctacatcctttcccaggtaaaatcacaagacagcaaaagggcacacgatcttctcatccagggtctgtgaggtcattcatacaatataggtttgacccttgtacatgtgcgacgatattcattcttgctcgtcggcctttgcgagtttctcgggcatcttgccggaaactatttgctatttgcttccttccgaaggaagctgtgtctgtgacctgctgtgttcgcggtcatccatcaaaccgaggttgtatcgtcatcattattaagggtaaaccctggccttgttgtgggttccgacgcaatctctgacgaacaccagaggtttagtgcagagtaacggctggaatttcagcccttaaattctgtcaaagcaatcttgtccgagatatcagtgacctcgcgacctggtctcaatcagcgacagcagaatccggccagtcacgaggtatggcctacccaccccccttcaatggcagtcagcctgtgagttacatggatctggtctcccttgttgtttgtatcgtgtctcaaagcaggtgttgaactcttgcatgcgaacctcagtacgagcaatatccgatcgacccattcaacgagaaccgcggtggacatcaaaaccaagattcgtatggaaaccacaacaacaacgatgcatcgtacccatacgtcgagccaaccaatcccggacatcctcctcaatccaggtctggctatcacccttccttcatcgagccacttcgctcgtcgccttctcctgcaccaggtgatcctttcgctctccaatctaacgccaatcattctggatatgacatgaaccagagatacgcttcaccaggcctgtatcctccgaatagctatggggctccgccagtaacgacgagcgccccttctgctggacctgccgcaggaatctatctacccgatccgcgtttgacctcgccgccaccgttcgttcatcactcgagctcgcaacaatcagggcttacagtggacggacaggctcaggcttattatcctcctaatcggccgtattctccttatcaatcgaatgtcaacgatggtcgcacgactccgagcgcagatctggcagatgaacccctactataccgccagcacaccggggacgatcgctatggtgcccctttcggcagagaaccttcgatcgcccgcgatggttccgttgccaatcccgatgaaccgatcacaatgaggtatggacccgctcccgagcgtatccttcggcgtctcaagacgaccaagagagtccagtcagtccagtcgagcgcaaagcccaccaagaagcgggctctcactatccagcttgcatgatctgacaggctatttcgaggaaatctggtcctggaatgccctgtaccgtctgctttgctcgacctgtgtccaatcgctcatcggaaggaacaagagttctctctgatgcgatatacagcggtcacgagccaacctgacgactttatggcgagtgcacgtgcccctccgtaagcttgacttatcgtactcatgagccggtaccatttttaggcagaacaatacactctcagacaaaaacagctatacgagcccacacggaagaccgaaatctttatcgtaatcacgatgtacaacgtaagccggaagggaaaacatctcatatgcagttttcccaccgctcgatctaaacctctttcatcacaaaggaagacgacgtgctcttcgctcggaccatgaggggggttatggccaatatcgcccacctcaatgaaagggaacgaagccctatttggaaagatgacggttggaaaaaggtagctggatatcgtgcgtcggcgagtctgcgtcgggctcacgagaatccttgccgcaggtcgttgtgtgcgtggtagtggatggtcgcaaggttttcaaccctcgaacccgagcgatgcttgccgctcttggtgtctatcaagaaggagtcgcgaagaatgtggtgaatggaaaacctgtagtaagttgcgtgatactctttgcattcaacgaagcattagttccgaccgaacggccgggttttagaccgcccacgtgtacgagtacacgacacaacgtgagtcttattcttgtcgagtctctgcagctgtggtctcatcatggctctgggcgaaccagtttatatcaactcgaagtatcaggtagtcccaggaaaaaaatgggcgccagtacagatgatcctctgcgtgaaggtaaggccgatatccagcatctccgcgctcgcgctcatccgttgtcttgcctaaaaggaaaataatgccaagaagatcaacagtcaccgctggtttttcaagtcagtttattcgggtacatcggtctgtagctagctcgtctcaggctgacgaccggtctgaaagcgcgtttggtcctatcttgcaaccgaagtaagacaactctcgttcgcctcatgcaaaaccaacctgacctgcatccctatcagtgtctgtgtcttgctcgatgttggaacggatccagctccaacatcgatataccacctgtggaagacctttgatttgaaaccaaattgcggtggagcttgtggggagattgtcgcgctgaaaggcaagtactggaagaaccttctcaatcccttggtcgctgcgcaaaactgtatgtgccgcagctggaatgcgagttcccgtgcttctcacaatgtcatcgttcgcagtcgagtacaaattgagcaacatcctcgacaagccattggaatcggctttcgggtgagtccttccggactttcgtatcatgaagcgcgatgctgactgacatgacgactcggttggccgaattctaggtacatcaccgtactgtgagttggctttgttatcgttgtcgttttcgattcttggccttatttctcctcagtcccggtgccttttcggcataccggtacaaagcgctggaaaacgacatatccggcaacggtcccctcaaacagtactttctgggcgagactatgcacggagctgacgcgggaatcttgtaagcggctgatgatcaatacataatagacaatatggctgaccttccgagcgtccagcacggcaaatatgtatctggctgaaggtaaaacagacactgacttggtgcgcatatcgtattgatcacgaaggacaccatttagacagaattctttgctgggagctggtctctaaacgaaacagtaactggatcttgcattacgtgaaatcagccagtgcaatcaccgatgttcctgatggagtaagtgcattcgagtgcggcggtgaacgcacaagctcaactcttgtgttgcaggtaccagagttggttgcgcaacgccggcgatggctcaacggctccttctttgctgcgatacactccatcgttcactttggctacatttaccgatcatcgtgagtggtatcgttcctcactctgggaagagcacttcaatctgctcccttcagtcattcgttcggacgtaaactattcttgcatatcgaattgctttaccgtgagtagagttggtgacgatacattgtcccacgccgtaatattggtctggcgcatacacagaaacgttcaatatcatcttcgcttggttctctatcgtaaattcgaaaagactgcaaagagaatttatctatattgagctgacaaagggcgttcagggcaattattacatcgctttcgtaaggcaccgccatgaactaatcgacttcagtcgaaaggctaatctgattatgaatcttgcagtttgtcttggcccagtctcttgacagctacggcagtttcttcaagtatattcggtatcctcttaattatatctaccttgcactccttataatgtgctttttgatgtctatgggtaaccggccggctgggtgagcaggctcctttccccgatatcacccgtctgtcctgagctgatcacatgcggtacgactttagttccaaggtagcatataccatggcaatggtcggcttcgcggtcattaccggctacatgatctttgctgccagtaggccgaattgtccagcacaaggcgagatctcgtgctaacaccattggatattcagtatggttggccgtcaaaggtattcaatcgatacaggctgacggatcgatcgatgcacaagaaataatcgacaatacgattttccgaaacatcgtgctctcgttagcggttacatacgggttgtatgtcgtatcttccctcttggccttcgacccatggcacatgggtcagtcgaacactcagtcgcaatcgaagtcgacaaccattcacgctttgctccatctcagttacgtccttcatccagtaccttttcgtgagtcgagctctcacggaatccgcgttgtggtgatcgctaatagcgatgaattcagttggctccgtcatacatcaacgtattgaagtgagcaccgagatatacaaagactgccgaatatttccgctgacggtgggggatctgcagcgtctatgcttttagcaacgtccatgacgtgagctggggaaccaaggggtcagatacggtttcgatggatctcggcgcggctgcgagcggcaaaggtgccaaaaaggacgaagtgatcctggctgtccctacggaggagaaagacattaacgcactctacgcggatgaactcaaattgcttgcggaaccgataccaattatcaagccaacaagatctgcgacgcagaaacaagaagattactataaggtcagtcctcgtttcacgggcgcaaaaagctcctattatttgccggggtcgtccgaaattaattcgcctgcttccacagaccttcaggaccaacgtcctaatggcctgggtactatccaatggggctctttgcgctggcatcttgtaagaacgaaaccagatctcaatcgctgtctagctgacgtcgacacgacgcgactacaggacgacgagtacggctggtagtccgacgtctcagacctacatgggatttttgctctattctgtagcaggactggctggtgagtttgcacgattttcaggaaagcatgtcatttatatctcaagctcacaacccttgcagccttccgctttctcggcgccacctattatcttatcctcaggttgttccaacgggagtagaaagaagatgactagaatctccgaaaccatcggccttcgagcgaacgcgctcgcgtcgcggggtcggcagcctgctgattgtccaaaggctcaagttgcagtggtcgtcgtggagggtggggcagtctctatgtaacatattcgtgttatctcgtccatatgagatcatgcatctctgagttgtcagtgcaatgtactagcggctagccgctattgatattgcccaatcttcgagccatgttaccgaaaataccggcatcggccgatttgaagacggatcaagacgaactgaagcgattcctcgttctgctgcttgagccttccgacatcctacacggtaaattagtccccaacgtacatacgaagctgcaagacttcaatctagtggactacgcccaggtgcttgatatctgtgaaaacgaggtcgatagctggactatcgaggacaaagaaggcttgatcagcggccacccgctaatcggagaggtgcatggcctgagtggcttcagcagcaaggagcagggtaatcttcagcctactcccgaagctgttctgagaaggtaagcttgtgagactcggctgttgaacctcggtcggtcaaggaaagatgctgagcaacctccttggttcatgaccctaggctcgcgcatttgaacaaagtctacaccgcgatatacccttcgctaccatacatcacctatgtcgcgggccgtccccgaagtgccatcgtgacggagatcgaggatcgtctcgggatagaccatgcgcaggtcccgctatccatggagaatggcgatatcgatcaacccgcactctctagcgatgtcgtccgcgacagggtgaaagctcctcacagcccagagtgggaggatgagctcgatcgtgcggtcaaagacgtctggaagatagctcgagctagactgcatggccttgtcaatgcttagaagtagtgcatggaaatccgagcgtccagctcgcggtgggaaggatagatggatacgttacaagcacatggcatacaaacgcatcacaatccatatagcttgcgaaacggttccagctggcaggtcagcagccgagatccggtgtcacaccatttctatactggtggctatgacgctctgatacccacggcaaaaggaccgcttgaggggataccaatatgtcatagaccattattagctggtaagatatagctagggcagaggttatgtaaggaaggccgtgcgacgcggcgaagtccggcaaaccgttcgcaccagcagctcttcggatcgggcgattcgtcacagccagttcttgtccattcccaggctataagccaacgtcctctccggccgacgtgactaccatgtcacctagaatccgtttccatttagaagtccaacgtagctgaacttggacagtcaactaacaatcgtcatggcagatctgcaagctttgatccacgatgtcccgccggtcactcgcttcttcctggtctcaatagtgttggttacagggtgagtcaacggacctttcatgtcttcattggctcttatcgcagtctaatcggtctgctgttatttcgattttcagacccgtccttttgcaacagttgacgcctggatcggttagtcgggtcgcagatacggagcaaacgacaacgctaaccgcgattagtatattccagatctatttgtcttggccccacatacgccaatcgtgggaaatctggaggccatacacctctttcttctttgtgggaggcggtttctcggcgctttacgactttttcttgatctaccgaaatggaagcagcttggaaaaggagacttagtgagtatggcggccccgttccacgtcacgacaggctggatctgagatttggttacacatcagcctcaatagaaccggcgagtatgcgtgggccaacttgatggtggccgggattatcatggcgagtctaccctgttctcatcagcacgaggcgaaatatcctaacgagcatcagttgcttgatctttcccactcacaggtgttcaacattcctcttggcatgccgtttctctttcgacccctcctgcacgctcagaactacctttggtgccgtgccaatccgaccatgagtatcagcttgttcggcttgctcaaaatccccgtaccatgtaagacgagatcgcatcatgcccgattttcatgctggagagcgcattgattggcctgatcccgcatagattatcctcttgcgatggtcgtcctcgatctcatccttgggggaccacctaaagggattgcgggactcgtcgggatgttagcgggccatacttggtagggcatgtaggctagcgacgtatcggaacacaggtctgatccttgcgtatgcttctccaggtggtttctctcgacctatttgcctacgcatccatcagctaaggtcaaacgtcgtaatcctttgggtgctccccaatgcttcttaggcctgttttccggtggtcggcagactgatcggatttacggacgaggcttcgaggcagctcgagggggtcgatcgccagtcgcgggcgaaggtaggaccacgtcccacaactggggcagaagtgggcagagactaggcggcgagccgctgtaacgcgttggctctgcaggatcctatatatccacattttacgctctgcgttctatatatacggtttcgttgtttacaatatatcttagacattgatcacaaccttcccaataccttcaccaccaccctgcttgccggaaagcagatcgaggaacgcttgcgggagggtatccaaaccactgtagtggcattcagagaatctaatctctccactagccaacgctttcgggaccgttgagtagaattcctggccgtacttgtgctcaaggtccccaacaatgaagccgttcaccctgaagagcgtcatgagtcagatgcgcccgaaagatcgaaagatatgccgatgaaacttacttcaaacgcttggcgacaatctggaagaggtttgtaatcccatccgactttccgttatacgccgagatccaaccgcaaacgatgactcggccgtgagtagccatgtgagcaatctcggcttcaaaggctttgcctccaacgttgacccagttgacatcgataccgttaggcgcctctttggcaaagatctcgctggggttatcagtcttgtctaattgagcgatgtcagacttgctatgagcatgtcattcgtgatcggttacagcgtcgggactcacagttgaataccacgtcagcaccgatttctttgcaaaactgcattttcttgtcggaaccacaggaagtgatgaccttcataccatctcgcttggccatctggatggcgagcgatccgacgggaccagatcctgccgagatgtaagcgacgcctcctttgcccttgccattctccgtctgagcgaactccttccatgccatgaaagcggtctttcctggcatgccagcagcaccgacgtaggtgctccatgacaacttctcctcgttgggcaagatcttgagggcaggaccgccgaaaaatttggcgttctcctcgtcctctttttcagtaggagcgacgcgacggatgtacgtcgtgtaggctgtggtgtcgaaaagtatgtcagatatgatacaaccccactggcgcaacaggtaaaaagggaaatctcacgcaatacgccatagatgtgagctccttcggggaatcggctagacttgctcttgatgacctcggctacaccgtgaccaccgatactgcaatttcgatgagaagtgggctgatcagctggatcattaacctcgtcatatatcgagaagagtcctttcgcttacggtttcttaagagcgaaagcaggactgtaagatttgacctgctcgtccctcattcgaccccgcatgtaagggtcaagggaaaccgacaccagcttgaggatgatttcattttcttgcaagtcggcgtcgaggtcgatttgagcagagccgtcgaccttgagggtttccaaggtaggctccccttggggcagttcgttgaagatgacgctagggttagagatgggagacatgttgtgcaaatggtatgcgaaagaatttgactgtaaaaggatggtgcggtagtaggtgatcgttgtgcgacgcgggaggtggtctgctttaataggagtcgcggaggtgcaaacaagaatacgagacgatgctgaatgatgatgatgatcaatcagggggatcaggggggatcgccgcatggaacaaggcagggaatggtggagaaaggatggcgaggtcgattctagaaggttagcgcagcgcatgacgaatagccccggttccttgtaagtaaccggttctcagatcggccaatccgaaaaacgtcttgcaaacactctgcaggttcggcaaccacatagcgcagtcttttcacacatttattgatcggctcagacgcggactagtaaacaaagctatattcatgacacggtcaccctcttagtcttctcctaaaaagtctactggtcgttgacttcatccaaggcagagatgaggggagagtagacttcgccgcctcgcttcttgtagaagttgacgaccttctcggctcgcttagcaataccctcgggctgcgaatcgaaatcgacatggcttagcgatcaatacttcccgagtcgcgcgcggtcacgaaactcacggtaagctcgaagtggttgtagacctggtcagcgggaccactcataccgtatcccttcaaaccgaagaactcgtgggctgcgacaattgcaacgtcagatcagacattcttatgcatcaacgaaccttcgttatcaactaaccgtagctcaaccaagttccacaggcgtaagcctcaacggccaagatgggcatgcccgagggcaagaccgagagacggtactcgttgggctgagcgtcaaagatctccaaacaaggagcactgacgacacgggccttgataccctgctccttcagcttcttggcggcatcgttgataaggtagacctcggatccggaagagatcaaggtaacgtcagctgagaggtaaaaaagagatcgatcagctctgaacaggtgtaacctatataggcgaatgctacaagccgatcgagatctcgcaactcaccgttctcgacctcctccaaaacgtaggctcccttgacggccttctcaaccgacgagttggcaagctggggaaggttctgtcggctgaaagccaaggtggaaggagtgtgctgcgacttgagcgcgaccatgtacgaggccgaagtctcgttaccgtcggcaggtcggtggacctgcatgttgggcaaagttcgcaaccaggcgacagtctccaccggctggtgggtaggaccgtcctcgcccaaaccgatggagtcgtgggtagcgatgttaaggactcggaagtgcgacaaggccgaaagtcggacagcaccggcggcgtaagaaacgaagttgaggaaggtggcgccgaaggggatgatacctccgtaagcggcgagaccgttgcaaatggcggtcatctatagcagggcaagggatacttgtaaatcaatatgacgctttcgagaaatggccagaagatagcctctactcacaccgtgctccctgactccgaacctaacgtatcgaccggcgtagttgcccaatccggtcgaggggggctggaagtcgacggcagtcttggatcgggtcaagttggatccggtcaaatcagccgaacctccgaagagttcgggcaagacgtcccaaagcttggtcaagacggtctcgctgagctttcgggaaccgacggcggcgtcctcggtggtgtaggtaggcaaggacttctcccatccctcagggagacgtccttccatccttcgctcaacctcggcggcctccttggggtactgctccttgtaagaagcgaacatcttgttccactcggcctcgtacttggcacccttgtcggcggccttggcatagacgtccttgacctcgtccggaacgacgaacgactcgtcggggttaaatccccatcgcttcttgagctcgacaatgtcgtccttcttgagggctagagagaggtcgaaggcacgttagtgatttgctagttatagtgaatgaaccgacttcgcgagtgtatgcgactcacgagctccgtgaactccaccggttccctgcaacttggatccgaatccgatgatggtcctgagcctgatgatggtcggctgggtcgtgttcttcttggcctcctcgatggaggcggcgattccagcatagtcgtcgtttccgttgtcgacgtgcaagacttgccagccgtacgacttgaacctcatctcgacgtcctcggtgaaagaacaggcggtgtctccgtcaatggtgatcttgttgtcgtcgtagacggcaatcaagtttccgagctggaggtgaccggccaacgaggcggcctcggcggcgacaccttcctgcaaacaaccgtcaccggtgaacactggcatggcgcagagcgggtcagctaaaagaaaaacagtgcggcgggaaggctatcggtattttgcgctcgacactcactaaaggtgtggttgtcaaagacgttgaatccgtccttgttgaaggtggcacccatgtgcgcctgggccatggccaaaccgacggcgttggcgaaaccctgacccaaaggtccggtggtgacctcgattccgtcagtcatgccgacctcggggtgaccgggggtgatgctgttcaactgcctgaaagccttcaagtcgtccatcttgaccttgtaacccatcaagtggagcatgacgtattgcaaagcacaggcgtgaccgttggacaggacgaatcggtcacggttgtaccacttcgagttggatggcgaggacttcatgatctgggtccaaagaatgtgggcgacgggggccatacccatgggggcaccggggtgaccagagttggccttggcgacgacatcggcagagagagttcggatctgagcacacgcagagcagtcgtacgtcagcaatgcgatgtgagtgtggatcagacctttttcgccaggctttaggaagatggggtcggaatcaatcgctcaatctagcttgcgttctgatttccacagatccggggtggaactctcgcggaagaaaccagataggcgtctcttgacctctagtctgcaacgttgaagagcctgcttttctacctgccggaatgtcgaggccgacgtgggattcgagcggacaacgatagacatcttcgaaacgccgccgccgattcagatcgacgaagtagaaaatcctatcccgatatgtcccgcaaacatcccagctgtcgctcgaacgcagaaaccgactgtccgagccggagctctttccttgaccccgcaaagagaatctattgaatctgaacttggatcgctaaactcacagtgttgacacacttctcatcgaactcgccgaccttgaaggaagcctggggcaggtcggtggaggtggtcttggcgtcgatggcggacatcgttgattattatgttttttaggggggtgttttgttttctgcaacgggtgattgaacgctcagctcgagtggaaagacagagtagctggttgatgttcttgaaactgacttttttatagtttggtacgaatcagaaacaacgaggcgaagactgtgcgattgacctggtatgtgagtttgattgggggattatgaatggtattttcggggaagagtgtgagtgagctgagcgagcgatgtcgtggctcgaaagccctgggcaagcgagagctcgtatgcctagtggtcgtcgtcgagtgatctcattggacgcgtgggaacgtggccaacgagggggggaaggggcagagggcaagcggcgaggcgaggtgaagacaaacgtgacgcaatcacattcctgccgccccggtctgtcgccccccgcttcccgctctgacaccgggccatcagaaatcaattcaggggcgcggaccgaagttgccgacatcacccatccacccttacgcgacacacagctactactacacacttatcgctcgcatcatctgctaggcatcgtttcatgtcgatgacgaccccgtcccatcacatatccgtacaacaagaagcgcaggtgaatggaccacccgaatcgcaaaccaccgacactctgcccggcattccccaaaaacaatcagtcaccaagggaattggcatgaaaacaatcgaccgaacagctgaacggtcgggcgggtcgatcccgaaaaaggtccggaccgggtcaagaacccttcggcgcatatcctcggtcgatgcggcttgcggctcgtcctttttttcattttcatctctcttccgcctcgacttgcgacttgttgtcttttcgggtcgtctcgaggattgttttgtttgtgaggccgggtcgagatgatccttatctttcggccgctttccgggatctatcccatcatgtagattcaacgaatctcaggcaggcggcgagtcggaccggactcggagtagtcggggctcacccttatcgaccttgccaacgtcaaacatccctctgtgatacagtgtcattcacatctttgaagagacctagcagacttcgaccggacccagaagacggcgtatacaggacaatcgtggttcgagaactctggaaaggcaatcactgccgtcgctcaaaagcgctttcccgatccagtcctggtggttgtgatagatccgctagcagaatcgtcggcctcctcggtgagatttcaaagcaaaagcatgtgtactcgggtcgatgaagcgattcaaaagatcagcgaccctgtcatcgaacgcacgtcaggtcgaagccgtggttctttggaccaaattaactgatggcagtgcgcccgccgcatgatggatgtaagaccacattccggtgggatttcgttcgcaagctgcagagcttagaatcgtcagtgtatactgatgaggctgggcggcgcttgatggtgacatcgagccagagtcaacagcttgacgatctgactggtgcaaaacgagactgattgatatagtcacgtcttgctggctagagctgcgtgcagagatgcctccctgatacgctagatcctttttcggatgcttgaccgaaactgaagcgcactctggtgcgactctcaattgtgaagagcactcaaactgttgcgagtagcggtgatagcaaatcgccctccataatacagccatatcgatgagcccccatgaacatggtctgcgaaattggtatcttgtgaagtcggtgaaaccagtactatctgtgtgataacgcgataacgcatcgaccacatctccagggcccgaccccgcgtgcatgcgttttgacggggaatgctgcacaaaagacgtcatcctcgtctcgccctcggtcttcgagcttcgagcggcaagagatgctagagagctctcccatcaggtcgacgatggtctttgaaagacttgagagtcccaagaggatcatcagttcagtctacatcgagcatccctatcaccctaaacattcacgacccaacctcttgttggtgttcagcagcagattcttcaaaggatcaacgaatccgcaccttatcaaaccgcctcaatcaatcatcaatcaggcaatcaggcgacactatgtcggcaccgaccgataagccctacccgtcgaatctcaaactgctcctgataggaaactcttcagtcggtgagtaggaaggacccttcttctacgtgggatgacgaagagtctaggtcgagtaaagtcgggggtcttcgaagaaaaggcaaacaaatagcttggccagaggaaggaggatatcggcctgagctcacgcgaagtgatgagatgtcacgtcccaactagagatcgattatacttacacgtcttctcgttctacccttcgtcccccgctaggcaaatcttccctcctccttcgattcaccgacgacgattttctctcggtgagcacgacccttgctgcatttctcggcacgtgatgacgatcaaaggctgagcacgatcgaccaattctcatggccacaggacgaggagaccacggctaccatcggtgtagacttcaaggtcaagcagctcgaggttgagggcaggaagtacaagttatccatctgggtaagcctgggctatgaccgccactcgagcccttgaggaaggtaactcattcgttcaagacatcgtggtcgattaggacacggcaggtcaggagagattccgcacgttgacgagcagctattatcgaggagcccagggtgtgattctcggttagtccaagcggtgtcgagcctcctggtcatcatccgctgacctttcccatatacctgacttggttccgtcgacatagtttatgacgtctcgtcccggacatcctttcaagcgctcgactcgtggttccgcgaattatcgacatacacctcgggagacgtcgtcaagatgattattggtaacaaactcgacgtcggggacgcagctcctccgagcgggggaaagggggcacgagaagtgtcgactgaagaaggcgagagatatgccaaagtcaaaggctgtttgttcctaggtcagtctcgagtctcatttaacgagtcccgagacgacgtacattcctcttacgacggatttgtgggtcacagaaacgtctgccaagacaaacacgggtatcatggaagcattctctgacctagtcatgcgtgtaagcggcttcgcgacttcttcgtttcgcattactggactgaccatcatattccaatcactcgactttgacagatcaccgagaccccgtcactgtggtctagcgaccctacactgcgaacgcagagcaatcgggccgcaaatgtgcagttggaggaggacgacactccgcccggttggacttgcgcttgctaggatttcgtgatcggggtatgggtataggcgatcgagtatgtagctgcttatcgatccgttgttgtaatgcctgtttggccgtggactgtccgcatttgtcttgagcgctgctagtatcgcatgtgtctacgctagtttataggaccacttgaaaccttgtcatgtcttttttccgaccatcacaatcaaaaagtggaccagatcgaggcgcttacccttcacaactccggagccgtggaggatgatggaccagcaagacctcagcaatacacgcggcttagcggccaggggagagcctacgatatgatacgcatgatttacctaaatcggtagaggagatcctcaggtggcatgggatctaatagtgggaaatactgcaatattttttccgtccaaaacccatgggcgaactgtatctcgagattgtgcgaggtctcacaatcggccagggcgactagcccgtcaaatcagctccaatctgatcttgagggtcttggattggctactgaaacggtcgtcaaaaagcttgcagtgctatcaacatcaatgtggtagctgaagagcttggcgtagcctgcgccaacttgtcacgtagcgttgcagatcccgtgactcaccatgattgcgagcagctatcgcttgcgcatgtgatcgctacaaccctccagatagacgccaagcctcagcctggccatcagtcattgcgattaggcacgcatacttagttggaagccgagtcaagaaagccattctcgatattatgagctcgggaagtacatcgatatttgatatgctgcttttgactacgaggcgtctcgcagcacgggcaagggtcacaggcgcttagtaaacgggtagctcaccgttatcgaatcagcatggaagaagatcaacagcacttggtcgcagaggctcgtcgaggtctgggtgagggcgatgaaatcgagctcgtcgacaacaaacgtacaggtgaagctcgcatccgtcaccccaaacgactttgcaaggcgcacactaacgattgacatgtttcaacatttcccgtgatcggcatgatcggctatcaacatgtgattcccgtgctatcgtcatacagtttagcgtctctcgcttcggcaagtttttcccaaaaatcacgcgatatgcaagtgccgattttatgatctgctccgcagccccttacaatctccgtgtgccctgattttgggaaagtcccagcagacgaaccgaggtcattcagccgcaacagcagcagcagcagcagcagcagatgcgccacttcaaggcgcatgcaggatgacgatcttggctctgcacgcagtgatggcccagaaagctccgcaacacccggcagtgtttgggatctaggacccgactagtgtcactcgtttgcgatgtctagattccaacgctcggcaagaaagaggttcatgtcgggtaggctacgggtatcgtgtggtcagctggaacgagcaattgcttcacgagatttccgtatttgcctcttcgacttataaacaacaacgcaaataaagatgggaccctattcaaagacaccagataccagctcgtcactcgatcactcaaggacgatataccgccccaggcattctaaaattgttgtagcagtagacgggcaaatacacatctatcatataccacctcgctgatcgtggtcgatgccggcagcaagcaaatcgaccgctcttaacgaaacaactacaaggacgtatccttcaccaggtccttcgacttctttgcaagcttcaccctccgatacggtcgttgaatcggatacggcattggaagactcgaacccctttttcgagcctgatcatgatcgagctcgggagcgatcacctgccgagggcaaggatgaagttcagtctgtcaaatcggacacggctatcgttgtgggacctgccaggacttcttcgcagaagagcgacagcaaagcggaagagaggctggcggtagagcataatgccaggcggatacctttgcaacgaaaggttcactggccgtcggagcggacgatgcaaaatcaatttcaccctgtcagaggatattccgccggtcaatccaatacagtcgttccgtccgcccccgggggatcgaggtcaaccgcttcgggctcgacttccgggaatgccaggattgcagaggaagagaggcaccgcagggaagattcgaatcgagcgaggagacaagctcgacgtctggtttctcacaacagggagcatgattccgcctgggtcatcgagaatgaatcagacaccgccttgtcatcagaaggcgaggaatacgaggaaccctccggccgtcggtcttccagcccattctacgcaaggaatgcgtatgaacgtggcgggaagagaggagatatcaacaggaaatcgtacgattcgagaagaaggtggaatgagagggatatcgcggacttgtcgatggacccagaatctagatcgaaggaagcccagcttcgacggagacaaggcagagattcaaaaactggtcgcggcggaggcccatatgacacatctgacgaaggagggaacagcgaaccggacacgtctgaccaggaagacggcgtagaccggatctcctctggcgggctcagtggaatattcgccagcgtcttcggcaaagatcagagactggctcggactgatgaccaggaccaggcagagaggggggagaaggctcggcccagaggcaagcggaatgcggtcaagtacctcggaaagaagggtcgggatcggatgaagaaacgaaggcgttggtcacaccacgctctcttccgtcgggattcgatgtctagtctaagaagcggtcgttcgagcgtaggtagctggagcggtatatttgatcggaggcggggcagtcaagaatcgggcaaggaaagcatagggcgcggtgcgggtgttctcgaatcggaacaggacgccagagacgatgcggaggacatgcatttagctacatcggaagatccaaatgatccgcaggtccaaaggacggggaggtcagaagacactgagcgcgaaaacgccggcgaggcagactcgcctagggatgacttacaggaggacgagctctacgaaccacacatgttgacgccagccagaacaggccattcggccaggtcatccttgcgttcacgcggagtcaacgtcgagacggaacaacaacgcgcacgacgtcaaatgaaggaggacttgaattcgccctacatcccttcaggccgaataaacaaggccgatgccgtcgcgccaaatgcccgactcgaagcggcacagggctggaagacgattgtcgacagcgtcaaggcattatgccgcggaaacgacgaagacgtgaatcacacgggacagtatcggtcgttcgctgccctgatcatctcgacgcaagggttgacaggggttgctagcccaggactcgcgaaggtcgcaccagcatccggcaaagaagccgagacgaacaaggggatgcgcaaactgtctgaatataccaatcctcgagacaactatacgaacacggtcaaggaaatcagcgatgacttgatccatgacgcgcaagaggacggagccaagctgaccaagaagctgagggcaaaaatcacacaacgagcgatcagacttgccgatgcgcaagtaggcgacaagcccatgcgaggcaagaggcatcagaaggagatacggatatcgcgacatcctgctgagctggtacagagacaggacttcatcgtcaatctagctaaagccctgattaagtgagtagactttcgagaccccctgggaaacgagaaagctaaactgactcaatcgactttcgacagttttggtgccccgacacatagcgtcgaaagttggttggaagccacatctgatgtactcggcgtacaatcttccttcctctaccttccggccattctcatcctggccttccgagacgatgatgcacgatcttcagacgtcttgctactacgtccggcaggagcactggatctctaccggttgagcctcgtgcacaaggtatatcgtctcgttgtgcacgacgtcatctcggtcaacagcggagcacgagcattgagacgtatcatcaaggaggcgagtagtcagggagcaatatttaactacgctgttgacatgctgaccgtgaaccgcgcccttgtgtagagtcggtcatatcactggagcgtcttgatgacggcagggttcttcatctcgacgtgtggttccatggttgccttcaacgggagcttcgttgatggactggcctcaggggcagtgggtcttatcctgaacggggtcctgatcggactgctcagtcgacacaaggtcatgagcaacattttcgagctcaccgcggccgggctgatcgccttcatcgcccgtggtctaggagctactggatacttttgctatgccagcatcgtctcgtcagctatcattatcattttacccggttgggcgatctgcctaggagcgctcgagttgggctcgcgaaatgtagcggcaggagccattcggatcgtatttgccatcgtgttcaccctgtttctttccttcgccatttcgattgggaccgaaatcatggacgcttctggagtcatgcaaccgatgaccgctccctcggcgagcgatggcaccttgttgagcagccagacggttcaagggtcgttcaccagtaacaataccgcattcgacaatcaattccagaacggtcagtatgccagaactctggtccagctcgtgtagttcatcgaactgatctaccactcgtcgtcgtcaacaggcacgtttactttcacgaacggtacatcctcaagctcaaccggtcaagtgtcgtgccctcgaaaccccatgtacacgcaatggtggtatactcctccccctgactggagcctgttcctcacggtccccaccttcgcggtcgcgctggccatgtggttcaaacaggattggaggagccgggacatgctcgtgagtacgggcgttgcgagcaccgggtttttggtgaattattgggtcaagccggtaagtcgcgtgaacgacgctttgcatttgagtctaggttctctgacggcgtgttttcaattcactttgtttatcctcgcagcaacttccggaacgtagcgacatatcttcagccgtccaggcgttcactgtcgggatcttgggaaacatgtacagtcgcatcgcccgagggagtgctttcccttcgatggtatgtcgcactcgctccgccgcccgagtcacacggatactgacggccttctttcccctgaatctgcgtcgataggttgtaggcattctcttggctgtcccgaacgcggtagctgcagctgggtaagtagcgggcatacgcatcgaccgatacaatgatgtccggctgatccgatagttaatgtatgaccacagaggtctagctcagtcgagcgatcaaggtcaggacaacgggacaagtcaagccgagttgagtaataccgtcatcatcgccatccgaatgtaagtcgtcccgccgcatttgtttcgaagcttcccgtccgatgaggatagctgacgtccgtacgctcaacccgtctcgtctcacagggttcaaacggcgatcgggttggccatcggattattcgccgcggcggtggtggtctacccgttcgggaaaaggggttacatctttgccttctaagtcacctcgttcgaagcgacggcattttggcagatgacagagattggcaggcaaagaacaaagagagcttgaggaagcgacgccgggagcacgacgatggacgggccgaacaccaaggacaggcatgggatcttgcaataaccactagacggcaagagatatgacgtggaccgacatgaaatcgagttgaagaatctctctatttatacacgaccggatagacactttgtatggtcgctatgtatactgcgtggtgactgactcaagtcattaaatgatataccgttgtttggcgacgagagaaaggcaggcaagtcgcggtgtgctaagagagccgttgtgagagatgcgatgaagtgtctgtccgaatttgaatattacgacggctagcgggatcgatcaccgcttgtgatcttgtggatatcctccatacatggggctgatgatgatgcgatacaacacatctcgaatgtttgtcgtgaagatggtcaagaagcaggaaaaagtttgaaactgtgcgctaaaaagggtaccgcgtcccggcaagacgccggcccgggggttcaaggacccgagccgacaagaagccgtgctcgactcgtctgatagatataccgtcaaaggaaaagcccaggtaggtatcaccgtggtaagattttcgtcagagtacaattgtagctcgatagtcgggtcgccttgtcagcaggatctgggttgtcgttcgagtgtttctagagtcgtgagtcgttgtcggtgatttccccgcctggagacgcggtaaagagctgatgaaatggtgatttcgcggtaagagcgtgatcgttggagcagctttcatctcccgtgttatcgtggttcgttcatcttgggtgtttgtgcggtttcaagcaaaacgtcaaccaccaccatcatcatcagcacgttcaaactcggatacacacgcacacagccagctatatcgactccactattttaaggatcactctcggccgatattcgcccttttccaactcactcgaacccgcacctcttccccgctcgcttaaccgggcgtgtctaccccagctttttcgaactatcaatctctcgtcgtcgtcgaccaacacgtcattgtcgagcagcacgaaccagcccgtcagacagcacctagcgaccacattttcgcggtaagtctctctcctccactgttcgcacctcttgtggttggctcggcctcggcctgacgaaaagataccagcgtcgttcccccgtgctgattgcaaactagtgccgactttctgcagcagcgagcaacccagcatctcgtcaacgacctgcccctaaagctatacctacctaaccacccgaccaccctaggaggaaatctcgaaggataatttcatcaaggttatacctctggtttgacgtagcttcttgccctttacaacatcaccaccatctaccaacccgagtcggacaggtagcactaccactcacaacaccgagaccacactgccggctacaacgaagctcgacatccacaggcaacctcttcgactcggcgcaaggactactacgctgtcgacctctactcagtactactcgtccgaccgttcgaccgagtacaccgtacactagctttgagaacggatttaccgccgtcaactcgcgaaatagctggaaggggaacgaatctataaggaatttcaccggttccaccttgtcagccgctcggatatcgaacagacgagccagaccgtctagggagacccgtgaccagcaccacagtaccggcgaaagcaaacaagcgagagacgaccaagcagccatgtccaacttgcaaagaaatacctcgatgaagaggcttcagaagcagttgaacgagaatgagaatcatcctcgaccttccatggagggcccgcctctgcacgccccgacgccgttgaggcagaacagcatgcaaggaacttccggtcctgggaccccccagtccggtggaggagggaacagcaacccgttcggattcggaacgttcaccgccatcgacgaaggcagtccttcgagcagcccattctctagcgcccctgcttcgcgacgagggtcgttcgcccatcctcatcaatccggaccgagacctgcaatcgtccgacgacgggactcgaccaactggcaggaaggcgcgatcgatattaccggagcgccttccctcttgtcccgagcgggttccccgacgttgccattgatgaccaccaagacgaggtccgcggcgtcttcccgacgaggctctttcgtcgggactcctctcgggggccaaggcttcgggatgagcgggatgaacgacctgatgaacggtcgtgaaaagaaaaagggagagtttgtcggaagtgtggattgcgggacgaccagtacgaggttcatcgtctttgatcagtacgccaagatcatctgtgaacatcagatggagtttcagcagcactaccctcatcctgggtgagtctcggcgtctcgcccttgctcccgtctcgcaatggtacagggctgactttgtcgatggattgatatcgcagttggcacgaacacgaaccgtatgacctggtcgactcgatgaacgagtgcatcgcgcaggccattgaaaagctcgaattcctcgggttctccgcgagcgacatcaagtgcatcggaatcaccaaccagcgagagacggtcgtctgctgggacaagacgaccgggaaaccgctctgcaagacggtcgtctgggatgacgcgaggaccgtcggggtcgtccgcgagttccagaaaaagctcgacgaggagggcctgccgtttggcgaaaacgaagaggacgagcgggagaaagaagccaacggacaagcaaaggagggcagttatttcggagcgaaaaaggagaacgccgaggatggtgccgaggcgttggcggaaaagttgaagaatggcttgggcgtcaatgagcaggccaaaaaggaagcaggtgcggacgatgggttgcccaccccgaccgtcatctcggatgtggccatcagcggagggaaaaggcggagaaagggtaaagaagccctggttgacatgtgagcctaggcggaagcgtctggaacgagcccagagaccgccgaattcgttgctcatgtttgctcttcttcctggtagtaccggtctccctctgtcgacctacttttctgccatcaagctcaagtggctcaccgaccatcatcccgaggtccgcaaggcgttcgatgaggaccggcttgctttcggaaccgtcgacagttggttgctttacgtgagtcgctccggtatcacacgtgtggcgcagaagagctgatctttcgtcgctgatacagaatttgaccggcggagtcgacggtggaatccatgccatcgattgtaccaatgcctcgcgaacgctcttgatgtcgctcaagacattgcagtggtaccaaccgctcattgactttttcggtctcaaggcgtccatcctgcccaagatcgtgtcgtcgtccgaagtgtacggcaaaatcacgtcgggacctctcgagaacgtgcccatcgccggtatggtcggtgatcagcaggccgcattggtaggaaacaagtgtctcagcaagggtcaggccaagaacacatacggaaccggtagtttcgttcttttcaacaccgggcccgacgtggtcaggagcaagaacggattgatcagtaccgttgcctaccgactgggcgatcaggaggctcctacttatgctctggaaggttctatcgccgttgccgggtccgctatcaagtggtgcgtcagatttgcaatgtcgccaaagcccgtacacgtgctgacataatcgtcattcttatcaggcttcgagaccaggtcggtctaattgacgagtcgagcgagatggatgctctttgttcgcacgtcaaggataccggcggagtctactttgtcaccgcattcagtggacttttggcaccgtgagcatcattcgccatcctcccccgagtgccacagctgaggcgaataactttttcaggtactgggaccctaatgccggcggaatgatcgtcggtctgacgcagtacagtaccgcttcgcatatcgccagggccaccctggaagccgtctgctaccagtcccgagccgttctcgacgtcattgaacaggaatccggagtccgtctggacgagttgaaggtcgatggtgagtactcgatggcatcggcaatcttggggtctcgacctcattctgatttggtcaaacgcgtcattcaggcggtgtcacaaactctgacttggccatgcaaatccaagccgatatcggtggtttccgagtctgcagacctcacatgcgagagtgagtctctggaaatatgccgacatctcgctgaactcatggctgatacttcgaccgacttgctcagatcgaccgctctgggttccgcgctcttggctggacacgccctcaagctctttggctgggacctgaccaagcccgaaacactttccgaggtcaacatgcaggaagccatgtactttgaccctgaatggcctgaagcaaagcgactcaagaatgtcaggggttgggagcgagctgtcgagcgagctcgatcgtggcataccgcggaagaagaggacgaggccgaagccgaatttgaaaaggaagatcactacaactagatagcatagaaccgtcgggcataaaggtcgattgtacaaatacagaacaaatcgcatgaccaggatacagctgcaatacacgtttctcctcctgcaggaggccgggaagacatgtccactcaaagcattctatggcaaagatgctccagctatcaaagcttttgcttgatcttgcaatgtaaaccaatccctagcggcagcctcgagcaagaccacaaacgcttggccctctgcgctctccgagcgcatcattcgctcatcgactatgtcacaaacgtcctttaacgttccagtatccgagtcgatgcgcgcaagcacggcttcgcgagctttgagggcaaaggggatatactcatcccgatgaccgagctgcattgtagccaggcgactatggagaacagcagtacatataaccgtcagggttcgagaggtcgagcaagagttgcgacttacaagccaacgtatgccaacaaggcagtcccgcaggattcttccggggtatgttcttcgtcgatatacgttcgaatcatgcctgatggcgcctgcgaaatccacccaggatcagtaaaccgagacaacgacggattttgagcttgcccacctgatgctggactacgtcattcatgatttccagcgtccactgcagaaggtcctcaatctcgggacccatctcgtcagcgatcgggctctgcaagaaaatctggcgggtccggacaagtccagcagctacccatccgtttgctgaaaggtgcatctcagaacatcaacactggggtttcgtctgtattctgatcccgagatggccgactaacatgtactccaagcccatgggtcgacctttcgatcgccaccgatcttttcgccgccaaatatgatgtgccgccagaggccgctattcggtttcttgaaatacgatcggtacaaacggcattgttcgtatgcatggttgagatgtactctaggcgagtccgagctgagcgcataggtcgcctggataaagcaatgatgagtcgcaggaagtcgtgagctagccgtggcgaatacataccatgaaaggaggaacctatggaaggacacgtccgttcttaagtcaagctatgtcttggtagtatcatggcaagcttaccatgtagataaagtcagcccagaggctgacgtgtccgattcggtgcgagatcgccccatcttcagtctgatgcccatgcagattcaatgcccataatcactggagtctccgagacaacacaccttgggggcgtgttcgagcaagaacagcatctcatcatcgatagcctttctcagctgatctaggaaatcttgcttcgctccatccgatgttccttgctcctgcttgcgagcgagatagttcaagacggtcaagcaatgtgtccccaagctcgctggatccccagcagcatcatcctcgaccaagatcagaccctttccacgaggaaagctttctgctgttggcttgtcagcgacgatttgttttactagggagagcaggaccggcgggatgtccagcaaagcagaggtatcggccgcagagaaaggggagaagctaggatgatggtattccaattcagcttcaacagcagtcgctggagagaggcgaaattcagcgccgacaacgactgaatcaattggatagaaatactcgcctcgctcccagctgacggagtgatgagattgcgcgtggtcgttagtccacggtatcatggtacgaccttattagagctctgcctcacctccccttcgaccactcgtgcatccgatcgattactttgtccatagctacagcgtgggcttatctgcactgctattcctgtgagggcgctatgacttggtcttatgagaaccaaaagtgcgagggatggcacgcatccgtcaaagctcttgtactcatcgacaagagacacaagacgaaggaatgaattgcctgaccgacaaagagcacgctgcttgctgaccggtccatgtcatcggggatcgtgtcggaagcaaatgaccggccgggtcgagaggatatgagcggtactgaacctagctgagcgtaacagaataccgggcgataagcttgtcagggtcatccactgcattgcatggaaccggcgttacaacattattaaagtgatatagtcgagtcctgatgtacatccgcttcacgcctggccgaacacggcgatatctcggttcgccctcgcttcggcatgctcctcgaacaaatcgaatgacctcgttccgacgagttgtcgcacgacgtcgtgcatgcgatcgagaatagcactcgtattgctcagggcgacgatcgtggtggcatataccgcagtttgctcgttctggtccaaagtgcagtcggcgaatcagcaactgcgtcctacgacgacggcgcacacactacactgacctgcagcgacttccagttgagcttgacgcgatacagctcgagctggtcttgcgccgtatgtatgctcaaattggccatccgctccattaacggtacagataccggcataggtcgtccgtttcgtagggaactgctaatgagcgaaaagagcgcgagcgtgtcggcgaccttgatgcgatggatagaagcccaaatcagcattgtgaagaaagcccgggaccgggcacgcagaattaccataggcgggtcaaagaacggagtctcggtgatggctttagcatagcgaggttccgtccgagtccacgcgttgctgagtaaagctaacactcccgtcaggtcgcggatgacactaaacagctcatggtattgctttttcggccaaggtccgcgaagactaggttcaaacccagcagacgctagctgaggctcgacagcggccagtcgtccctgagcagagcgggatgttcagccatgatgagaataccttcatacggaaaaaaggacttacgactacgccgaggactttactccggtacgtgccggcgcgctcctccattttactctcattcaaggcatgacccgattcttttgcttctatcaagaaccctctaagctcatccatgtagagatccgcaagagcatcgacgatcttggcagctcgaaggcgaacgattttacgagccgaagtcggtttcgggaacaagctgatgatgaaggctgcggcgaacccaaccaggaccagcaaactgaaggtgaacatgacaattatcagcaccgcgtcagtgcgcagccttgacacccaacttacgctcgcttccaggctacgtcaacgccgattccgctattgaccagcaaaggaaggtgcgaatcgacccaagaataccctacgatcaaagccatcgttactccgatcatgagggggaacgccatgtcaccaggtttggccaccgagatccgccaaaagacgacaggggcaacgatgaccatcaaggctgccgtggtcccgtaggggttgcttccgttgccgttcccgacgtaccaggccaacataccgagcacaagccctattagcgtgccaatgaaacggacaaggaacccgagaaccaggtctccggaaaagactgccagtcccgtgacggccatgatcctggcgttgcatcgtgatcagtatgattctgccggatgtaccaggtcgaggactcactgagcccaaatggacctgtttgaccgcgagacatctcgattagttgcatcacggcgcattcaatcttggatctcgagctcacctgtttgaatatgcgaaccaagcggacgatggtacgaccgacggaacccagagagcgatcgagactagtccagccttgagcgcaaagagaccttccggcgagctcaaccagctccagatgaccgacagttttcgcatgagcctttggatcgcattcctaggcggtaaggcatcgaggtcgggtcgatagagcttttccttctttgccgctcgttcctgttttctttgttgtttgctggaaggtttttccaagctatcctcgtcgctagacgttgaagactggtccgcatcgcgaccttgatattccctctcatcgctgcccaattcgacaggattcaggttgtcattctcgcgactcagggcgacctttccgatcttcccaaaggcagtcggccattggaagcgattcttgtttgacctcgcttcaatttcgagaccggtctcgagaaagtcggcgagagccatggcatagctcgtcaagttggtcgaaaagacgaaacagaggaacagctgacgcatcgataatgtcggtcgatcccgttcgatcgcgtggagggcaggatgatctttccggtagtcacccgtctcttcgtcgaacagatccttgaacttgtcgagcacttgcaggtgttccgattgacgatatgcctttagtgcatttcggagttcgttcaaattggcttgcctcttgtccaatccgctttgtgccgtttcaccctcggggtaaatctttttgcgagtccatcgatggtgattggtatagtccaggaatcccgaaaagtccgccagaccggccgtacaggctcgacgaagtcgctccgaggtcgaatctagtatgggcaacaagtcgttcaagcggtgtccacgttctgcttctttctgcttcataaactcttggtatcgcaattctctgacatggtgatgccgactgtctccattgagatggagtttctcgtcatcgttaccctcgagaccaccagagggtatggcagatttctgctgacgggcgaccagtagctaagagaatcgacaattcagaattggcaagcatgctacggcacggtaacagatttattgtcgacttacctggaaactagataccccaaccatcctgccgatcagggtacgactcttggtcaacaaggttttgagatcgtgtgcgctgatacgtcccctgctgacttccagctcgagcatcccaagctgtccgctgagcgccaccaacgtttccgaagcgaccgtcctcaactgtttgaccttttccgccaactctgcccaggcgttagggtccgtaggatcagtctggaggacgttggcctgtagcgcgatgatgccattcccgggctggaggaaacccttgacgtagccatccgtcaccaaatgattgacggtttgggggaagatcaagatgatcgccgccaatgctgtcgcgatgtagaatgcagtggggatgaggaattgtgttgcgagcgtgtattgaggggatgggaatagcggtccgtaggtgcacaagatgatctatacggacgagcgggagacaggtcagctgacgatctgggacccatgttgttacaccatgactgaccatgacaatcgtcccaaagatcgaagccaaggtcaatttgggagccatcgccctcatggccgccaaggcgtagcttccgacgaaaaagaagatcgcaaaaacgatcgtggacctcgcgtccaggaaatctccgtgaaagatgaagctctggaattgagcgtccggagcggcaccgctgaccagagccgattgagccgtggtgtattgtgaagcgaggagcgtttgagaacgcgcctgcaaggccgcagccatcgcgcatacaccccaagcccagccgatcgccatgcccaggacgatcgtgagcatggcctacaggacgatcgagtaacgggcgtcagccggtgtgttcggacaattcgaggtggagcccagacttacgaatatgaagatggtcagtggcatggagggagggatcatgatggccacaatcactgtcgattccggcccaaacgtcgtcagtaatcttccacttcgctcgctgatcttcgacaggcgacgcttacaatgaaagaacccagcctgacccagcacttccaaggtgtcctgcacgacgaggtagatcatgcagacaaagatgaccaccatggacctgaaccagttcttccatttccttcgatctttcaggttcctgaccatggtaggtgggagctttgacatgatgcccgaggccttcttgggagtagatttgggactagcatcttgctgggtaccagcggtctgggcgtccgagctggtcgacatcgcggacgaaggtatacctctcgcacgtcaggagaagctaaccggctctgttgctgcggaaaggggcagaattcgataacctagtaagtgtgcgactcggattcggcagattgtttgggatgtggaaagccgagctcggtcggggtcgagatccggcgattacgattattcgaggatgttgattatgaggtgaccggaatctacagagggtccacagtttcgaggctgaggctgaatctgagcctctcttgaagaatactggatatgcataactataagtgtttgggtttacgatctcgaccgtccgtgaacgtcgtactctctctctctcgttctggtcatttgatcccgcacacatgaatccaaaacaaagacagcggcggccggggggtagtggggggaatagtaccgccggtagacttgcccttgtcacccgaggtgctcaaatagttagcaggctgtacgtgaggccgctagccaggctgtgcgatcatccctgttaccgaaagcgaaattggagtcgataccattggcctgatcgatcgcacctagatctcggaagcatgacgcgcggatacctcgcatcatgtccagctgacttgcgtgacctactagtagttgtgcgcacctgtccgtcgcgactggctccccaaagactacactgtgaaactcacaggacgcagggtcaaaaggaatgcgaccgcttgagaagaccgacgcacgttgcggcctagcaactcaaagatccagacacgattactagaccatcagccagcgagaacgatgagacgacgcttttggtatgatcaaggaggcttttcttcggatccgagagatagaccgcgcttcgtcaagtcgacttttgcgcttttgattgactcgacagcgggttgatctcacatcgacttagctaaagtcacttgtttgaactagatgtttctgactcgaacaaggtcattgactatatcgatacctctcgctaaacatacctcgcctcggcttcatctaccttcgagccgaatcctctctgaattagtgtatgcgttcagccgttgctcgtctagctcgaacgcaactctacgccatcaaaccgctggtccgacctgcatcaccgctcgtcatcaacaacaactaccatcccgctcgaacttattgcgtcatgtccaacccgaacccccacccggtctcatcggcgcccaccgcggcaccggtagagaacgagcagatcaataccgacgtacctcccgctcaaaaggaaaagaagcagggtggacagcagcagcagggtcagaagaaggaaaagaaggccaagcctgctgccggtggtaacgctcagctagagttgagtcctcctcccgagttctttgacactaggaacgccatctttgacaagtacaagaagatctacgatgacaagatcgctggtacgtcaggggaaaacgccggccgcgatgcaaatcgggaagtatcgcacgagctgatgacgaaccaggtctgttttagccatgcctcgggaccctatcaccgtcaccctacctgacggccgcaaggtcgagggaaccgcttgggagacgactcctttcgacattgccgactcgctatccaaatccctcgcccagaacgccatcatctccaaggtcgacgggaccaccctgtgggatctcaaccgtccgttggagaagagctgcgatttggccatcctcaactgggattccgaggacaacaactacgaagccaggcaggtcttttggcattcgagtgcgcacgtcttgggagaggcatgtgagaggcacctggaggattgttgtttgggttacggacctccccaggagtcgggcgggttcttctacgagatgaggttgaaggacaataggtgagcacccggctgctcacaagcgggacgtctgtcagggagagaaagctgatgctgccgctggacaggccgatcaccccggccgattacccgaacattgagaacgtcgtgaaaaaggccgtcaaggaaaagcaaaactttgaacgtctcgagttgcccaaggaggctctattggagatgtttgccgtgagtctcgtcgttggcgtttctcgcatggccaaaacccccgaatgacacccggccgatctctttcagtacaacagctacaagcagcactacattcaaaaccaagtccctgacggcacttcgtctaccgtctaccgatgcggacccctgatcgatttctgtcgaggacctcacgtccctcacacgggccgtatcaagactctggccattaccaaaaactcgtcgtcctactttttggccgacgcgaagaacgacactctgcaacgagtctacgggatcagtttccccgattccaagctgatgaccgagcataaaaagtttgtggaagaggccgagaagcgggatcacaggaagatcgggaagcagcaagaattgttcatgttccacgagttgagcccgggaagcgcgttctttttgcccatgggaatgaggatctacaacacgttgatggagtttatccgagtgggtgatgggtctccccagtaggacaggctggacgcccgactgatcgtacgtgttacattttcccgtcagagcgaataccacaagcgtggctatgtcgaggtcggttcgcccaacatttacaactcgaaactctggaagacctcgggccactggcaaaactatgccgacgacatgtttggtctttcggtggacaaggaagagtttgctgtcaagccgatgaactgtcccggacactgcttgatctttgacgcgagggagaggagttacaaggaattgcccttgaggatggccgagtttggtgtgttgcacaggaacgaggcgagcggtgcgttgagcggtttgaccagggtcaggaggttcgtccaggacgacgcccatattttctgtactccggatcaagtgagtcctgcgagtcgtttcgaggttgccacgacggggtcgtcatctcacacacgtcatgcattccccatcgcgattcgtccccgctctcgtctagatcgagagcgagattgccggcatcttcgactttatggacgccatttactgcaagtttgggatggagttcaaggtcggtctgtcgacccgaaatcccgacaagtttatcggggacctcgccatctgggacaaggccgaggctcagctcaaggccgtgctcgacaatgtcgctcctggcaaatggaagttgaacgagggcgatggcgcgttctacggtcccaagatcgacatttcgttgaccgacgccttgaagcgagagttccagtgtgcgaccatccaggtgagcgtccccgtctgatccacgcatgcgcgtgcgtgtgctgacaagtatggctgatacccgggcacgctctcgaacggtgcagctcgactttaacctccccgagcgattcaacttgacctacaacggaccggaccaagtcgagggcgcttccacccgaccggtcatgatccatcgagcgctcgtgggatcgatcgagaggttcatcggagtcttgacggagcactgtgcgggcaactggcccttctggttgagccctcgacagatcgtcgtcatccccgtcgctcccacctacgtgagtggaaagagctcgtgtcgcgggggtttcaaaacccaccgtcgactaaggtggaatcgctgaccaccatacgtttctgatccgtatctgcgctggtgatgccctggggatggggggaactgtatacagaaagattacgccaacgaggtcgcttcgaaattgtgggacgccggtcttttcgccgaggccgacgtttcgtccgatacgctcaagaaaaagatcctcaacgccgagattgcgcgatggaactttatcctaggtgagtctctccgacgagggcgggcggggcgtcgacggaagaaccgactgctgaccctggcgagcaccgcgatctctcttgtcatcccccgacgcgcgtacccagtcgtcggtgaggacgagaagacgaaccgatcggtcaacgtgcgatcccgggacgaggatcaaaagggacgaagcgagacgatgagcttggaagatgctacgaaaaagttgatagggttgaaggagagcaagtctcccttgtccaagttggagtgagaggtcggtcgatcgcgcatgtgggtgttgggtgggtgtggagagaggattgttagtaggacgtatcgcccgggggaaggaaagaggtgtaggatgtgtatagacacgatggaatcggtagtcgaggtggaaggagagtgcgtgcgtgtgtgtgtgtgtgtgtgtgtgtgtgtgtgtgtgtgtgtgtgtatgttggccgtgctgtgcggggcgtgggctgtgggcgtggctggctggctgggtgaatcccgcgtttcaaggggggaaagcaaattggacgcgggaaaacgagggaaacgcggggaaaggaggagcgaggggcagcgagaaggaaggggagaggggggatttgaccagattgggtaattccacacgcacaagggggcaaggactggctagagtactgatcgtgagatatggctctagacacatcatcaaccgtggtacagaggaggagacacatgcaaaggtaccgcccaaaggccaaaggatctcttctcgttcgagccatcaaagtcgagacgagtgctacgtacgctgctacccatcgtggccaccgaggcgtgtttcccatttaccttgttgttattttttacgtttgtcggtgttgccctccccatctacgtccctgaagccccggcccctagcttgtagctcgtctggtctctttgtcctgtttctttctcactttctcactttcctcctttcgcgtcgattacccgatttcgacgcgcaaaagagagagacagacaagtcgtccaaccatctcggaccatatcgacactccacctcgttgttcgctcagaaaccaaacgagattcacgtcagagccattcctttactctgtgctttgtgggatcccttccactcgctcttgacacgaacacgaacacgaatcgaggtgagtcttttagcgtgacccgcggatgacgagctgcgagctagaggaggttcaagctcaaggtcgatcgggtatatatatagagtttcgacagctacgacgtactcccatacactatcacaaggtggaaaacctcgcacggccgtcagtccgcactgcactactcgggattcgataagctacctcggtctacccactatactacactagtcaactgtacgggacgtcgtttcaaatccacactcgccccacccgccggacgctcgactttggtatcaactcgacctcgacaccgactctgcacatctcgggctcttttctaaatcgactcctcgctccttgccaatatcgcccgtgacaagtctcgacgacccgggcatctaggaaagatcgccccatacgtcctgtgcacatacaccatccccacgcatcgcatcgtatcacagagatctacgtaccgcccataaccataggacaccgacaccgataccgacaccgacaccactcgtccgtctagctttagcttggggaaagcggaacatgctctccatggacacgtttggcaagcaacataccgcaccgaccatcgcttcacgcccagcctcggcatctgctcctgctcctgctcctactcctactccaaatcctacgcccgctcagaattcaacctctaccctcagcatgaataccacttcgaaatcgatctcaggggcgggtcagggttcagggtcggggtcagggtcggggtcgggatcgggcgtgtcgagagccgtcccagggttctcgaccaccgctccactggatcggagcaagggacacgtcggggtcggcgtctctgccggacaactcacatctcaatctcaatctcaacctcagcatctacaccaacatggacatcaacagcaagatggcgagtcgagcgcaaagatcgtctcggccctggtacccggtgcgacaggggtaggggaaggaaacctccctcccgtcccctccacccgaggaccttacagtcatagcaacaacagccctgcgggtcccgctggaaacggaaactcggctcccaaatggggatcgagtcattcggggtattccacccctggtgccgagagcaacgatgctcataaacgaaaacgggatcaggcttcgttgcaacaccaacaccagcaacaacaacaacaacaacagagactcgggagtggtcagagggtcccttcgacaaactacgagtacagttcggatgagatggaggacgacctcgcggacgatagcgaggacgaggatatcgagcgggaacctctccccggtgagaacattttcagtaggattcgacggaccgcgggggacggatccgagggggacgaagacgaggtggaagacgggacggccatcatccgggttcgacgttcgggtggacagacgggtacgggaggggacgaggtggacgagcttgagagcatgaacggggacgtcgagggcggcaaatcgggccaggtgaaaaagatcaagttggtactcaacagtaatggggctaaagtcaagacggggaaagtggtcgtaggaccggatgggaaaccgaggaaaaggtcagtcgtcgaggtcctgtacgcagtattcgtccggatcgggttgcgggggtcgtccaggaggacagtaaaaggaggtcgagcggagggaggagggaggggggcctttgccaaggaggggcgtctcaaaggagaggctcggggggatgagaggatcctcgggaggcgccgtcactggcgatcgaccaggccaataaagtcgagatgcttcgtcccgacgagcggtctcagcgatcaccggttcacacccatgtcgactcgagcacgagctgacgcgaacacgttctattctttctttatcgacatcattctaccgtacctcacactggacacgctcgttaaaccttcatcggcacgatgctcgctgtacgcaacccactcgacctttttttcgccaactactcggatacctttcaactctcatcaaacgcccacgcccacgcccacgccggacctcgattgaccgtcgtcgcctcggcattcgacattcctcctcgtcgaccacggccacgacgacatcacgaattgccccatctacgcacctcgaaactcatcgaacgggtcaaacggggctcggggaaacgacgcgctcgaccgacggtgggctcgggcgtggacgacttgtgggggctcgacacgtcggacgcgacgatacgcacacgtcgggcgcgaacatggcctatcgtcgaacgtgcaccttcgccactctctcgcaccgtcgacgctgaccctgctgacgacacccacaacgtgaccaacgatgacgatgacgacccggaatctctggctttggatgacagcgaggatgcgaaccgcgccgtcaagcgacgaaaggttgccggtgacaatgggagcgaaggcagcgttccccccaaggacaaggtcaaggccggtctgatcgaaggagaactcaaggtcccagggcctcggcgcagtagcgggaaccgtcgggccgatcgaccgagacgacctcctcctctggaaatgtcctcggggaaccgagaactgccccctccttctgccggcatgatgtcgagcatgaggaatacggggatggtcagccccgtcgtttctgggtttccattgcatcaagccgacaaggtcactcgcgaggcagtgagtgtggagattgacggctcaatatccggtaccccagctgacgctcccgtcgacggacagttccgcaactcgatggcgatcaaggacgctcaacgatccctcattcagcaacgcaaagaaggcgccgtaccgcccatctcagatctacccggcggtggacctcctccttcggccggaccgcttcccacgcttctgacctacattccgacgccaatgagcgcagaaggaagcggcagctttagtgaacgacgtggagacgagatcaagcacaaggtcaaggggatgaagttgaacacgggcgacatgtcgagcgttcgagatggtctgcgggtaagtcggtcgcaaatatcgagttgacacgaccgggtgcctgtgactgactcgcacatgtagacggcaccttctggcaagtttggtggacgatcggcaggacaatcggccgatgaaggtttccgatcagaagacgacgaagagtacgaggctcgcgaagcagccgggtacgacgcccacggcaacagcttttacgagatggaaaagaaacagggggcccaggaactcagtgccgccgccgcgggcgacgcgtcgaccaattcccgtggacaaccccgcactgctcatccagcattgggcacaagccttcaagctcagcagactggcaagggaccttcgaaccgaggtctcccctcgtctctgcacatcccaccctacggtcagcgcaccgcatcccaacatcaactcccgccgccacctcaactcgcagaaggcgcccaacagccacccgacaccgctggcggtcgaccgccccctcacatgatgcccactcctggctactacccttatcctggaccccctccaggtcacctcttggccggacctcctggacgaggcatgcctggaccccctcctcccgggttccacccgggccaatacgatcgcgagcgagacgctttcatgagccatttcgccaagttttacgacgccctgctcgactctacccagcttcgagccgatctggcgaccaagatccacaaggccaacgagctcgtcggtgcgcatcagatcgagttgagaaaggtcgaaaacttgaggcagcaatacgaggccgcattggccgacctaaaggcgcgaacggacaagacgttgaatgcgagcgaaccaaagacgggcgaacgcggttcgtccaggcccaggagctcgggtggacctgcaggagacgtcgagatgaagtcgtcgtgacagtccgtagattgatcgcggaaagaacaaaacaaggtcgtccatgcatgtgaatgcgagtcgtgtttgtagaccgctcgactcgagagctttcggtctgctcaactagtaatacagtgtatattcatccctcgttgctttattcaaatctcccgacattacatgccaaacaacttgctcatcctgagcctggctccttcccatccgtccaatgcgggtcgtacatcaaggtaaaaactgagattacccgccgagggagagtcgggcccgggctgcacgctcgagggaggtcggcccgagtaaaagtcgatcacatagcggatctcttcgccgcatcggttgatcacccagtcgtgacggtcgaaaggtgcggtgtagctgatcgttgatggtcggtatcagtgacagccaatcgacctgaggtcagcgacagaactcacccgagagccacattgatccatgccttcggcgtccgctccttcggtcgacctttgaagctgaccaaccggatcccaccacacttggtccctccctgaccagcctcccacttcaacacttctgcccaggccttttcgttgacggcgttatggatcgggacgatggtctgcatgtcggccgggttgggagggttcgagccgtcagagtagagtccggcctggtgcttgcggagcatagcccggaagaactggccctcggacgggtagacccatttgttctcctcgcccgtggcatccgctgacgaatgacccgagggtgcgtctggtgtcgttgtcgagctggatgcaacaggtgtctcggcggcgtatcgcgggatggacgagatgaccctgtcctcggacaaacgtcggacccgtttccctgtaggtaccggtccagcaggtgttgacgaggtcgagtcctggtccgtggacgaagcagcctctttgaaaccctcggcagcttgggctttggattggaagggcgagtctttgcccgggttggctgcgaaccaggcagctctcgtagaatgatcgacgggacacttgtcggccgaggcatccgctccagctgctgcaggagctaccgttgacgcagcagccggcttgggttgttcctttgatccccagagactttcaaacatcttctacaatcaattctggtgcaagctagtgggtcttgagcggtcgatcgaacccaacattgatgtccatcacatgttcgaggtcgacttgaatgatctcgatcgcttcgagttcgactttctcgcgcttctccggtcgcgcttcttccggtttgcgacgccaaatcagcagcaaaagtggcaaatcgaggtcaaatgatcgattgggtgccgtcccggtcgcaaggccagacaacaggtcagttcgctacttgtcaaagtaagaggagacgtcacgagagacctgtgaggatcgtgtgattttgatcgtaagatcgaccctagaatcgcaagcttgcggtgctacccctggcgtgcgctgcgacggtcgtgttcgtgttcgttaccgagtagtactcctttcagtttgcgttcagcatggtcagctcttaaaccccaatctcacatgctcatcccactttttggtctgagaagcatcggataagtgattgaagggtgccatacgcctttggtccgaaaatttgcggatataaatatccgagtacgtcgagtgaacaagacagcccggccggtgtaagcctgagattaattcctttgcaaatcaaactaacctttcttccgtcctgaccgtgcattcagatcgatgcatgtacccttctcccagtctagagacaaaacaggtgggttctcatgatcacatgagctggattgtcaaggtaatgctcgacttatgcggattacagtgtacctgaaaaaggcctacgcggagatagcggagaatccacccttgatatccaaagacaagaactcgcaagaagatgccaaggcgacattggaaaagtgtattcggacatatgctggaaacattctgggtgtcggaaacgacatcctaccaacgacccgcagtctagcgatcacacagctgaagcttaccaggaagagtctcaatggagccactataggaatcgacgaattggaggcatcttgcgagagctacatatctagtttatcaaatctgaccgacgaacctccacagccatctagcatcttgacaaaaatctaaatgcggtgaccgcgtgcgttcgcacggaaaacaatagtcggctgtctgtctcacgacatcggcgttgctttgtgggccctgaaacggttgtcgatgacgaactgataaatcaagctagaccctataatctcttgtagtacacgccactcgatgtttgttcggtacgattgatcgttctagtttctctgaggggtttgccaaaactcgagcgtcaggtgacttgtgaacatctcggtaggtcttaaaaggctgacaacctagagcatcaagtcatacagcgtctagacgtcgccgcagtgcatcggagacacctctttccactacagagccatgcaatgataaagatgaagcatccttcatggcgctcgcaatgcttggtctctgtaaacaagggagtcgagcaagagacagaaatccggcttcccccaactcccctctctctctcagagtctggaacgtgcattctgcaagtgaatttcagccttgcaaggcagacacacagcttgcgtattgcggccgagaagttgatctacatttttggtcgattgaagggtatcgtctggcgctgagcaaggatgcccatgccattctttcttatgacggcacaagtgatgacgagcaggatacggaggcgacgtgaggaagcacttgttcacagctctgattgcgtctccccatgctagtgtatgtgggtcacaagagaccgattctccgccttcctgaatggtattcccattacctgctttttatacagtagtccgctctgaatgaacgatgtgtagacttgtcttcgtagtccgctggcttgctcttagcggaaggagcacaaccattttgtgtggaaaggcatatcacgatagttgcacgtgttataagccatcggcacgtttatgaggaaaagtacagtttaccaccgtctaggtgattttacggacgatgagatagattatggagaataaaagtcgctggagcacacattctactagtagttcgagcgagaagcaagattgagcggctcgtagtgctatcagggtggaggtccttcattcgggtgaaaccggactcgttcatgcttctcggctgtcgttgtttgcatctcctttgattgtagctcgtagcaattgcgagatggtgcgtgagcatcagcggaaaggtggtctgaggtatggcgcaacatcccgtcgcgtcagctaccgcgaacggcgatgaggaatgtgagctttcctttgtgatatcgggagatcatcgtttctgctcatcagcgctggcctcttgtgggactcttgatggagtcacttaaagtctgtaccaatatcagccgataattgaacggtccaatcgcaatactttcgagagaagtcgattggcaaccgaaacaatctagcctggcggttaaatgtccactttcaacgagcctacacctgacaagggtgagacgcccgaacccaagctggccaagtcgaacggtgaattataccaagaggaatcggttaggctccgaagaggagaggacggtaacctcacggctgaacagttcctagaaatcgttgacgaggcagatcacgaagactgcacaacattcaattgatcaaagatggggaaatttcgacaggcgaagccaccattcggacgccggttccccgtatgccagtccaccttgggacactccatcactgaccgaacagtgcgggaccactcgacgatgccagatggcagcagctgcgccactggaatgctacccccaacctcggtcgcctccgttgacttgtcaagcagcaccagtcgcgactgatcataggtctcacacgggcaacgccgcttagtggtaagatcccaaattcgaacgatccgttctcgcgatgtcgtctatgttgcttagactattattgttgtaacttgtttgttctctctatcacaactattctagaactttctctatatcggggcaaatgcttcgcatctttgctaatgctcggtctcaccgagacccgtgaacgttatcgatcgcgaatcacggaaatcgtgtcggatcgccgtcatcctaatgtttcttttcgaatacgaccaccccgtatctgaagttgccgttcccgaaccccctcctcatcgcttggaaagctttgaggaaagcgacgacgtccctcccttgcgagaaggcgaacgcccagagggaaggcgactggatgagggagagggagatgtccctacagtggcagcgacaggaaagaggaatgagatgaaaggaagtcagtcaacgctgataggctcgacgatggacaggcgactcaccaagttcgtttcacgttgatgctgatatccataggttcacccccttgtctgacagtcatcccgttctcctcggctttctgcaagtacccatcgatggtatcgagcgggggcaagagcatgccctcctcgatcggtttgatatcggcttcgaaccctccttcttgcatctctccagcgggtgctttgagccagtcggcgatgaccaatcgtccgccggtcttcaggagttgtgaggaggaagtgaagaagaggggtttgttgggaagatgagagagcgcctcggagatccagacgaggtcgaaagagtcggtttggaagtgttcccccattttctccgcgtcgagctggatgtactgcacagaaccaccttggctaccgagcatgatcttctccccagacctatccaacgtgttgggcttcgtcgtcgtgttcccaccatcgatgagcttgtccgtgagatcgtaggcaatcttgatctgttccgagctgatcgtcacgcccgtcacttcccatccccgctgttcggccaggtagcgggtggtccctcctacgccgcaaccgacgtccaataccctgagcttgcgggcaggttgggaggacgtggtagcatcggttcgcaagtgcgcgggcagaccgagttgttgagcatactcggaggaacaaggatatccggatcgggagaggagtagctcgatgagatgaatctgagcgacttctttggtcagagcgtcggtctcctcggtccagtagccatgatgaatgtgttgacccctggtaatgccgagaaccaagttgtagcatgagatgagctctcaaatcacgctcgaaagatcggacttctacttaccacaagctgaggtaatagttggagcagatgtcatagtgcgacttgatcctatccttgagcgacgtgaacgaggaagattcgtcctcggtcggctgcttggtcacgggtacggtcggagcgacggtatcgttcgagatgtcgatggtcatggctcgcaatgacgattctgagttcaagctgttgaattatactactgaacagcaatatcgacagtagctatagtagtagtctaggatgacatttccctatctttccatcgatcgagcgacgattcaactttgtgctctcgtcatcatcaccgtaagcaaaacggtaatgtcggatgcaaattaatcggatacaaaataacatccgaggttgggaatcggatgtaaatcgaaatgatctctggattcttctctcttggactctttcgatgatcgatcgatgatatgacacatgacaagcgcatttcttacggtacttggtttccacattgtcgaatatcgtcgaaagggcaagcgggggagttgagcatctatattaccttctatatatgcaagaacaatcttctgcaaatccatctctatgtatactgtttctgctcccattttcttttttcgatgttctggtcgccgatcgtcccggcgagcatcttgcgccatcattctcatctccatacacaggacatcaacgacacctggttctgtacccatcaatcttgcccggattccgatcccaagcttgagacgctatatctgaaggggtctgtacgatcttctgtcctttggtcatcgatagcttcgatatcgaccgagcggacactcggtggattgtcgggcaagctaccgctaccgttcccggccacaaacgataacgggaccgcctgttccgtgagagaagaatcttcaggttccgcttgaggggttcgcataggaaagagggaagctctcgcttcttcccctcccttatcagtaatgtagaatgaatccatgagtcccggctggtccccatacacgctcgagcttcgggaagatgccttggacggggcgcgatcgtcgatctcagggttgacactaccgccgggtacggcggtcggatcgatgctgttggggttcagggaagcaatatccacttgagtaggtggaaaggtaatgaggaggtcagctacgagggcttaaattcaggcttgatctgcattccttacttgaagctggaacaagctctacatgaccggatgcttgcaaaggtcccttctggtcgcctatgctcatttccgtgaacatatctctgaacgacaggtccacctccgggaccgctggaagggacggagccgcttctaggaatcctccggaaccgctcgtcgtcgatggttcgcccatctcaatcggataagccccacctctcttgcgatctgacaccacgacagtgagtttaatcggatcctcgggcttctgggctgccacgtctcctcgggtgaatttcaactcgtgtgagcatcgactgagccccttgcgtgctttcatgttgacagcaaacacctgtgtttccattccgccatttccggaaatggactctagggcccatttgatcatggatgtacattcctcggttccgagcggtctcttgagcttctccaatgcttcctgttgcctgctggtctctttatgcgatccatggatttcaaggcctcgaaattcgtaatagtcgccataacctgacatcttgtcgaccgtgaacttccacagtccaggaatctaaaatttcgtgaacgatttcattgattgtgcgactaaccattcgatggttccaaagggactcacgattcccacacctttcgaagccttcatgagcatatcggcccacttctgcaattcagtaggtgtctctggagaatcaataccaatgctggttgttctttttctgatcagcctgttcattattgaaagataaaatttgcgaagtagtatgacgactatatgtcttggtcagctacacccgtcaatgtcgatccggacgctgacacacagtcatggcacgtcgacatatatattccgaggcggaaacagatcgagtatcttgctatgtgatatggcatgcaagtattcaggcccagcaacgcagatgaaaggaggtgggtgtacagaaactatgtcgcagtatgatgtgacttgttactcgatcgagaaacacggcatgaagggtagcgattcgatatccgtccgagatcgaatcgtctttctgaaataggtatccttgagcggcagcagctccgacagtcagccgttcagcctaggttggtagagtacggaagtgagggaatatcactcagggtgggtctgagtatgggtctcattggattctgttaagccctcgggggagatgagtgacgcgagtggagagccgtcggcgatctacggcccgtgtcatatttactcgtcttgtatagcttggctgatacaaaatggtgcggtctgcccatctttcatcaagtacacttgacttgctctcattatccatctggattcaaggcggaagtgaggcagacgtcttcataaatagtcaaaagcggaaagaggggcgataaagtatgcatccggatatggtttgtggccgttcgtttcagctggatcagcactctcttccagcgggacaacgtatcctaactgccggccctcttgcttgcccgtatacgcaacgagttctctgttcccattagcccgagctttccagtctgccgcgctaacgattcatgaatctcgtctgatcgtgaagttcaacgcgcattgcaacgtctataaaattctcgctcaacaagctgcggaggggcgcatttcggaacgctcgaggcctaattacctatttaattgtgttcacctaaatcgccgaatctgataccgttgctcgtgcggtcatctcgcagaaggtagcgaaaattatgatcagttcaagctctgctctggttagatccgatcgctccagacggaaaagttcctaacgcagttctccaagtgttctatgtcggctgaacgtagcaaaaacatgatcttggccagacatcatgttggggctagcgccactttttgggggcaggaaagacagacgcgtgtgacattctgtatgcgggcaagagggcgtgactagttttccctttgatggcgatgatagccaagtcgggaccactgatccaccagtaatcgagtatttccaagtatggtggaccaagacgggtctcgacgtgcacctgcgggcaaaagacagccgactcttgccacatggtaggaaccaaatgagaagttcattgatgactttttagagatgatcacaccaggctcctatgagaccgactactcgtcatccaggcagagactaccccatgacttcattctgacacaatttcagcaggtccgaaattggcaggcttcgaaacggatcgtatccatttttcgcctgtcgtttaatttggtaccaggtccgaagcgccagagaatatggggaagcgatacgagctggtgtcagaatcaggcccatcgaaattaagcgggttagctgatccacatattccgcttatttcgttcctttctagatttctgacagctgtaattaagactgtgcattggaatcggcttgattgatgcagaggtggctcgtacaccccatcggaaggttcgttaccagtctattcttccagttcacatcgctacattaaagtctatcttgatcgaacgcccattttcgttccgcacctcatctgcctcctgtgtttcgaatacagactggccgatattctatcgctgagggtagtagtagtactgagagtactgagtgccatcattaccgcttggctgagttggctgagttgagaatgagtatggagggtgctggtaatgtggctgctgcggctgaccctgaggccgataatactgagagccctgggtgctgccactaacgcttggctgggtgctaccagtacggcttggctcagtcgcgtatccgtatgaactcgtagggtaccggtaaggggtctgctgcggctcgtcccggggtgtcatcggggagggctggccgccgggtgtggcatcgacgttcgaaggtgaagctagcgggctcacaaaacccaagttggtattgagctgtacgtttccactattcgaaggagtgccataattgtaagatacactagcggtggacgaagagtaggtggagctggcatcgaacgcgtcttaatcacaaatcacgttttcgtgtcagtttgatgtattccatttcgaaagcgccagcgctcacatgaaccgttccgtccatcgcttcaaacgggtttcattcagttagctccaccttcctttctttcaaagttgagaacagcgccaggcctggggacgagacgcgcaatattttggacttaccctaggatccgggtgactgtcatgttcacgctagcacgtccttgttggccctcgaactccctggtaccaatcgcaaaatcgatcgtataatactcattgtgattgcccttctggaggttctggactctgactgagactttgcctagcggtatcttaccttggtcgcagtcctcgatgatggatctcatcaggttcacataggtagtgtagtaggaagccctggttgggatgttgacatcgtaataaggatgagaatccaaggatggtgtgtagcccagacctctcgggtgggctctccgcccatcctgaggattcagtccggtgtgaaccaggtaatatacaccctgaacctgcgagcgcagattggcggtcgaaaaacgtgattcgactaagcacgtgtcacgctaccggcttacgtaggcgtcgtcctgttgtgtaccagtatggccatacaaagctgtatggaggctcggacctatcgcgacgagcaaactgcaagcatcgtcgacaaccgtcttccttatctcatgagctttcggtgcatcagcttgcgaaaagagctgaaattgggtgagttatcggggcattttgatcctctctgactgattggcagtgtacgctctcggtcgagtatgaagaacaataagagtctccaggttcgcgagatactggatgtctatatagcttcgccggacatgcctatcgatcggtattgagcgctatgatcaaaggaaagctgaaggacgaggtcgtttttaacagaatatagtatatgataaaacataatagtcgtcattcagcctcggatggcgaattcatctactagtcattcaggatttcgggggtttgttcggccaagcagcggtaaaatacctaacgatctcgcttagacacaacaaatgaaaggacggtcacgacatcgtttggaaccggattccgacaagcatgccgtactcttgatgagcaggataggttagcatcatgagttaaactgctagcgatgaccgatcttcatcacgccatgaggactgattagtcggttgctccttttgtcgactcgcgactcgacgacattttattgatcatccccaggcttgcttcctcaaaagtgataggaaatagaacggcctagatcgctcttgaaagtcgtgtcctcgtgacctgtgtgcgtacttctactgatggaccacaaacaatggtcatgagaccacacgatagcgttcgcgaccagtatcctttcaggtttgggcacgtcagtctgatcggtcgatgacacagacgctgcgagattgaccgagccaaggcttggtgattgcgctcagccacaactcgcgagtttcgttggtggctgatcatattctaatgtcatcctttgtcgcgcataaacgtggacatcggcggggggagggcgacgaggtgatcgatggaggtgatggatggatacggtaggtggggggttgcgtcgctcatcattcggtcgaccacatcaaacaacctcaactgtacacttttgcacactgatcactgacgtcttcaatccattaccactcgcccgctcgtatacgatccacattgacatcacacgcttccaattcaacgccgataacaaacagaccgagtcatgagcgctcgccgggaacggcggccatcggtcgtgtgcttcgaagacaggtgcacggtcatacccgaaggaggcccggtaaagacgaggttggccaccaggacattgtgagtaacgacgataccgaatgatccctgccaatcgagtctcgtctggggacacgtttccaatgagcccgatctcgatactgatcacatggcgctcctcccgatagatcgattcctctcacacggaagccctcatcagacctctactatgatccgacctttattcccggcccacagaaatccttcaagatccccattccccgactttgcaacgctccgcctttgcccaattcgagaaacaggagattctcgcatggtcaggtcaaaggtccgccactccggagctgtctgctccaacgagcaaatcaggccgcagggccttgcggcgagtcgggtcgaccgggcaggaaattgtcccgggctgtcagcgttgatcgagcatcattgaggtctgatcctatgagcgtcttgcctgtctgtcgagtgccttctatcgacgtcggtccggcctcacaccccgcagaacaagtcgcgcagtcgggtcgtccatcgctcgcggtcctgaccggcgccagctctgcatcgcgcacagacacttcgcccacctccaagtctcgaccgggaatgtttggtagtttcaaacgaccctcattcttgaagcgcagaaccaattcgagcgacgacaagagcgccttcggatcaaacggggcgtccttgaaacgctggacgagcgattcctcgagcgttctctcacccggagccgagtctccgtccatggcaccaagaattggagacttcgacggaccgccgacttcgggccgtggattcttctcagaacagggacgaagtgccaacgtgcctgcctgcatattggaagatcagaccctggagacggaacgagacacgacggccaatcaacccttgctcaaatcccccatcatgttagaggaaggtgataggtatgacaaatacactcgtctgcgtgcgtgctgtcctcaatgttcacgagccacagacaagggtttgtcggacgactgggtaccgcccgtctcaaagagagcgcagaagaagctcgacgtcgagcatatggtcaggcagatcgagggcaagcgactcactggagaagaaatggacgacgccgtcgacgaaaaggcgtcgtcgttctgcgtcgacgaggtggagcttttgcgtcgacggcgaagctctggcggatctttttcacaagagactcaagagactcaagagacatcgccagagcgcaagcccgtctcccagacttgcctcctgggaatcagaccttcgtcgcggtcaggttcagcgtcgccgagtaacggtccgatctggctctgttccggtaaaggtcgctccccgagctcgggcagcttttctcgacaatcgcctgcgaatacgcccggacgagctacgccagagcgaagatctgccgattacttctccctcgcccgtcaggatgccgcggcggcacaggcggctcgagaggaactcgacgcaaagattgcggctgcgctctcggccgaagcttcgttggccagagaatcggcacgggaaagggagacgccaggcgacgtttcgcctagcaatgaaatgtctgggaacagctctcgcagaggggactggttccgccggatggcagaagggggaggggtcatatcggtttgaagcacgcagaatctgaaagtgccgttaccatcatcaacatcaccatcatcacaccgaattggatcgacattgtcgcctgcagcctgacatgttgtatctagtagtcggcactataatcgttgtactagaatcctgatacatcaaacgttttcctcaagatcagagccagcatatttcgaggcagcgctgattgaacgttgacggatggtgtattaacagaccttccagtggccaatggccacaatcgagatgtaagcgtttgaccggtggatgactcctttcgagttgaacaggtcaggtcgaaatgacatcgacgacgcgacgaatctttagtttccgctaacagagcgcgaagcgtgcgctaagtaccgaagctgccgaacgtggcgtctcgcgggggtctcgggcaagccgccgatgggttcaagcaaggcaggccagcgttgagaccggacgagctggaaatagggctgatcaccccggattgtgatgatcccgttcacccggcatatgacggctcaaatgaaatcacgactccacaaaggaacatgacttctggcttctggcctctggacactgcaaaacatcgcgcacacgcaaaaggcagggctgatcgtctgatacgcggtggttgccttgatcgaccatttcttgggcgtggtgtgcaagtcgccttttgttaggccacgcgcggcatcaattctggacttgtgatcatcaaaacggtagaggccacgtcttttgtatggggcatcagcatttattaattccagccgttcagcgaaaccgaccgttcacttcgaacctaccaagcagcaagcagctatcttttgacatctcattcatatcgacttagcgtggtctgatcctggtcactcgtagagatttgccttcttgaccttgaaatagtactgctttggattgtcggcccagctttgcgagcaagccgatcagaccagatcgcgcgctttaccctcatcatcagctatcagcttctcaggctggtcgtcttgctagctaggacggacaggacttgtcttatcggctaggcctttcttgccttgcttgctcgtttcctggacgaagtcgaaaggcggtcgaaaaagccctgaatctatctgattcggagtagggtctgttgcaccacgacatataccatcaaatcggcgatcacgagatcacgagatcacgagagaggtccgagcttgcgatcggccatcaagatcatcaaggtcgagcggcttccgcgatagaacagctgtctacccggaagcctcctcgcaagcagctgagctcattacctagagacttctggctcgacacctacagaccctcgtcaacaccggctgttcttggtcgatttcgatctacagtcctaccatgtcccaagtacaccttgatcgtacaatctcgatcgcttcgcttccgacatctagctactcttgctcaggtagcgcgactccgtcgtccgacatctcttcgcctagctcgtgtccgccaaccccttcacaccaacatcatatatttactgccgatatcggttcatctagtcaggattcagtgctacgaggaaccaaatatccgtaccacaccggggcacttcagaccaagcatctggccggatggaactcggtagataccttcgaaattcgcgagggaaacagtcagaaggccgtcctgatctctccaagcaaattcaaagtcaagctcagcaggtcgaccagtcctgcgtctccaaccaaaagcactcataagcgagcagctagctgcgaacaagaacaagaacagcgagaggcattgtgtgacataaagcttgatgacgaccaactgccggatcgaggcgtcgtgcgggagagggtatcccttgtggatcagccggtttctcctgtgggttctgagagagcccggttacaacaggaggagggtgcagtgtcaagtcataactcgtcaacctttcgagtggatcaatgcgtaacaacctcgtgtggcagcagatatcgcgaggtgagttgatcgaaagctctcgccggttctatgtcactgatttctctctgtaacgcacagaacctcgattacgacgtgactgccgcagaaatgacggcctttctgcggatcacttctccaaaatcttcaccccatgctgtcaatcggcatcatagtcagctccgctcagtgcgagctcaacccgcaaggccctttatccggatcacttctcctctgtcttcggaggccgaatccccaacagaggcgtcgtctcaacgggacaagacggcccggatatacattaacaaggcccggtcacgccgaatgtcacgtgggtcgcaagccactcgaccgcggaccatgttcggatgggcagctagccaagagccacccttcgtccctgttgcgggaccttcgtctcctttgagaccagcctcggcctcccgcagcaatacaacggacgctgtcctgacaatagcggacatccgcagcgagcttacacctcgcccacaagcttctcctgtcgaagaccgacgattttctatttctggcgcattctatcggccccgcccttcttcaatggtctcgactagcagttctatctcctctgggggacgattggcctgcggggatcaacaccaacatggcgagcacaagcagcaaaagaggcccataagcggtctattccgacggatgtccagttcgcattctaacaaggccactgcctgcaaaccaatcttgttacccagtcctcgtgaagaggaggagcagtttgaattcacgtcgccaggggcaaaggcaaattcaagcggtatccaattacacggcggccttgaacctcagtcaggttggaagcgcttcatgcgcaagatcatcagtccaaacgatcagaagtatttcccctcaattgagtcccgtacggggagccagtcggtcggtgcaaagaagcaagagacgggcgagcgtgagcctgcagatctcgctctcgacgagaggtccttggctggacaccctgccatcaacgagtccacagactgtgcaagtcggatctcatggtccgtcgacggtattcccccggaaactccctcctccggcgtcgggccgatcatctctctaagcgaggatggcactgtcaaggccccctagatcgtctccttgacgaacagagcttgcggccaactacaggcttggagcacaagcttttgagccgaaatcgctgtgactacgattgactagagcgagcatgagctgtgtatgacagtctgacctggaagacggcagcagcagcgacagagacgagaccacatggacactgaacgtttcatcccaacgcatgtacaatatgacgtttctacagcatagctatattctagcgcaagcaatcgtgaatagcatcatcgccctgagtgggtttctgttatgaggttttgcaagttacgtaataggttacgtaatatttgacccgccatcgcggaatcgaatcggagtcttcctcgccgtccgcccgccttggcctcgcctgtcctcgctccggcccttgtgcttctgccccgagtggtcagggtggtctgtctgtaatctgttgtgtacctcttcttctcttgtggctgttaccagatcccacagaggtcaacatactgcgtcgaattcagtcgtactgtaccagctttgaccctatcgatttgtctctaaaatagcgttgactgccggctcacacgttctagtgatcaacaggtggtggccgtcatcaagattgtcaagtgcatcgttgtcaaagtcgagccggatagcggagtcctggtcgaactggaaactaatagggtgacaaattcaaaaccgggacatcagtagtcgggacagataccgccgttgtcgagccttttaagatcattccgtccaagactatcgtagccggttgaacgaaacattgcacgttttgccggagatggacggtacgacctaatcacaaccctcccggtatcccaataacgataacacccacaaagaatcgacactatatcctctcgacatctctactaagatggccagcgtgatcgttgggcaacctgtacatctgcaaaccgagttgggtgcaggcggccaaagccgcttggactcgtccaaccttgagcctcgagccgcaccagtcactcgtcgtcgcaaaaggcaaggaactaggccacaatcgatacagacgtcttacaacgagttatatcccaactccgaaccgcctcatggcacacagactccctcgaccagctcttaccctgctgtcgctgatctcagcctgttacaacgctccgcttcggtccagcaaacttatctcggtcagaacccgccatatcgcctggaccagcagaaccacgtcgccacgccaacctacagttcttcccaagccaccggatcgggcttttacactccaacgcatctagccactcctgtgcacatcggaggatccgcgtactcgaccccgtactcggtaggaccatcaccatattttgcctatccgggatctgcccctttcgttcaacctgtatatgcccatgagaatgggcaggcgtatcccggagccagctatcacacatatcctcgagggcctactgaagacgcgtaccttcccaccggctatgctccagcacaccatcgttatagcctagggaacgcctcttaccttcacctacctcaatctccgtccccactaccgcctttcgcatcttcctccaaagtcatccccagttttccgcttgtcgccgttgatactggcagttctagctcgagtttgggtagacaagggccgacggacaggaagcacgataggcgaagactggtgcaaagccatagccttgatcttgggtcacacatggataacatgcgatgggatcgccaaacggtgcagcatggtgcaggcagagaattaccgcctttccctgaaacaggccgcctgcatgagcggactgctagtgtcagcaccgtctccacttctggcccaagcaccgtttcacgacacatagatcatactgcaagcaatggccttgatgccaaacccaatcggaatggaacgacttcgacgactcgtcagagatctctgtcggatctgtcccattcagcgaaagccccggctcgccgattagaaatccgatgcagcatgacggaaggaaggcgattggtgtttcccgacactaacccctccgttgcagtcgtccccgatggggagtcatccgatgggacgggctgcaaggacagtagatcagttgtggaacaagcctcgacgtcctctccagatcgcaaacagcgacatcgccgagccaggactttggtggtgccaaacttacggatcttggaagatggcacggccgtagtggagccgcaagcgatcttgcaatccgatctagaatggcttcgtcacgatgtttcgccaccagcgactcgcgcaagcgttgagatggaaaaggattccgaggacgaaaataatccggatgtgctacgtgaattgggcatcgctacgccggaacgtatcaaggccgaaccgtctgacgaggccggtagcgcaaaaaaacgcaaacgactggaaacgattggtaacagcaaggtctcagcggcggatgtggctgcattacctacatctcccactaaaaagcgagggcaaccttcggctttagctgtccccaaaggtcgagtaaactcgaatcgaactttcggcagattagccatcaaagaagagcttgccctacatttcctcggagtggagagtctctcgaatttcgcatacggctcattgactaatgacgccgtggaagctgttgcgcccagcggttctgggggttgtccggagaagccaaaggtagaactgccggtgtcaccttcacccccctgtgatgagcctttggagtttaacaatgcagtttcgatgctcgctcctgattggcccgacgcgtcttatccatggaatcaagaactcttgtggcagcaaaaacgtcaacagggtcacgccacgacgaagaaggagcaaaatgcgatttcgctcgagcattatctcgcaacgcctagcgatgaggagcaaagtgacgcagattcacgaattgcccttgtgagacacctcagatcgcgaggcaagaccagcaagacgagttccgacgcacgggaggctgtgcgacacgccagacaagggggcaagacccctttggagcgcgatctggacatccgaactcgactgcccatcatatcgcccgccgatgaggcgggttgcctttgcgtgggaagtaatgaggaaggtggcggtatggtttgctgcgacggatgctccgcctggtaccacctatcgtgctgtggtatcgagactgaagacgagctggaagatcaatggttctgtcgacggtgcgatccccgcgagacgcccggccggacactgcgcatcaccgattcgccaccggaaccggtcggtataccggttacgccaaagctgagacaggtgcttggcccaactttctcagccacagacgagacaacccggagctatcacgcacacacaagcgacgcagcgttggccccttcgcctaccttttcccccggcgctcgcttcccaatttccctaatggatactcctgccctgtacgccagtccgcgtgtaacgtcaggctcgagcgtcacatccaaattcgcgactcccggaacacccttaatccaatcaaaggcgaggatagtatcatacgccgagcattacaacgtctgccagacacctggcgcgccggattccgactacaagaaaatctattctactccgaagttcgaagacttctttgagaatggcgttatgcaatcaggttccacgcctgtgccccgcaatcccggtagtccgactcctatcaacaagccacggctgagtgggatgggactgccaggatttacgacccccaccagcagtcaaaatttcctccggtcccttcaaatcgggacaaacgggtcgactccagccctcgagtttctaccttcttcagttggaggatcctcccattcgtctttccccatctcgccagtcctctcagcggataggataaagtacccgtctgtcattacggatagtatatcgccttcgccctacagagagcacaaacgacaagtgtcattcggcgccagagcgaccagtttcagcgctagtgcttcccatttgagggactcggtaacattcgaaggtacggagaaagggcctctcgatttaggcggcgagttgaaggcaccaccgtacaatcgttacgccagttgacgaaaccaagtcagtactgtgtatggcatcttcagaccatattggaggggatcaatcctgacaccattgcgcctctcggtatagcgcagaactcagtatctgtacgataagaagcctacattcatattagccctatatagacttcctgttccgaattcgttgtatatgtgctcttgaccgctgcagctaggcttctgctgtttgtattggaggagctgaagaagtgcctttgttccgctagctatattcctcacgtaaagctgtgaagcacgcccggaatccgcgtttcatctcgctttttcaatcaagtgacgtaacggagtcgccgatacccagacgaatccacaagggcacgggtttcgattcgtcacgaagttgctaaagctaggacgtcggtctctcatcttgcaacgcccatgaactcctaccattcaactcgctatatgcccactacccattttaacgtgatcatctcgttcatatatcccatcgccgttcaaccgaccgggtcacctccaaactatcacaggcggtgctaatcagggccatcaggtcgacgcgacattgcaccacggcattcgggtagcgaactcttcccttcctttcgattagtagactctctggtgatctgagccgcaccagtggaggttcgatcctatcttctgtgatctcgactttaggtcaacaagttgtccttcgccccatcgcaggcttcgcctaagcaacacgaggatgacaggtggctatggacgcgaagtcactcagggtatctgctaccctaccagcgccgatcttggctcaaatcatgtcgaagctcggtgcgatttgctcgccttcagcatggcagtcgtttggaagcttagtaacctaatccaatcataggacttcagaagccgcatcttttctggaggacatgatctcggccgtgatgatacaagtgttgaagtttcagcaacttatcaatcggtcgctggtcccgttggaagacgctggcgtcgtcaagggctatgtctcacctgaagaatcgtgcgtttaccgctgccacgagtcaaaccaaaccatcatcatctaatcagaatgagtcgatatgagttttgtgtagtctcactcaattacggttaaaattgacgaaccgcggtacagggcgagtcttttccgactgggtgtacttcaggtctgcaccttgacgccccaaggatcttggctttgatacagctcggacaaggatatcaaattcccacaagcttcctccaatccttcttcgacacgctcagcctccctgtctctgggtaaggttgaggtcatgtactaattatatgggtttgaagatgaattcaaacgctcgtgtaacagctcggcacatgcgggtcgcggagatattgtatgcagccttgaccaccaacacctcgattaccaaaaggtgtggtgattgactggatcagactggttgttatcatcagaggctgacatgtgagatggaattggacagggacattttctaccaggacgtccacctgtttggcaagcaagccgtcagcgatgaggtttgtcgagaggcatgagttcatgacaggctagagggttgatgacctagtatcgcgctgacgtgaacagatctccgacacattgatcgcgtcggccgggttacgacggagcgattttaagctggtaagcccagatcaaccctgaatcccatgagacgaagtcgattgttcgttatctttcgccagtccgcagcagcaaaaggtctcttctactgtccttttgctgatatcatcgcagcaagcggagatcccgctctcgatggttcgcaagaggtaagcaagattttgcatcagctggaaactctatggctgacaaccgttagccctctagtcatcatgtatcccggacctgagtctcttgagcgggattcaatatcgtgtagtcccgcaatggcttctagtagttgagaaagaggtcagtattcgctgaggtccgtcctgatagtagcgggaatacttttcgcgtcctctttaggcggtgtatcatactctggtcacgatcgggttcgcttcctctccccgtatcggtccaggtattattgtcacggtgaggagccggtacgagaccgcaaagaggaaaaacagctctgacggcacgattttagggcaaaggttatccagactttgcgacgttgcgctttcttcgctatctagcagatacactgccgaggcaagtgaattcttttctacgagtcctttccagtgtattggctgatgcagctgatcaggttgaagatgttcgcattggtcgacgctgatcctcatgggctcgatatactttcggtgtacactttcggcagtttcaaatcgcaaaagtccagcgaagcgaatggtctggcactgggacatcgtctcagatggattggtatcaaggcaactgcctggaacaggcaagaacaatgtcattggacgtctcgaagcggtcagctgacttgcccggctttatgtgtatcttcttgtgtatcattagccttggaatcgaacccgatcggctactcccactctcggaaactgacaccgcattggtgagatcgcctgaacaccatgcccgtaaatcctatgctgacgttgaacaggccctatccatgctgaggtctagacccgctatgccgcgattatggaggtcagacataccgctaattgctatcaagccccttaaggcgtctgaccaggatgaacccgaacaggcgcgaattggcgcacatggtttttttgcagcggaaagctgaaattcagattctgtccgacacctccgcctcgaaacacacaggaaattgcctccaccaagacaatcttcgaagaagcggtctgaaacctgctttggtaaagcttctagaagacgacatcgctgccggtatgtcggcgccagaattggaggaagagtaagggcagatgtcccgctaagatcggatgcaaacagagatattgccgatcgccgatcttctcgagctatgacgaattcagcacgggacgtgattcgcgatcgcattcagatccgtcttggacctttcccggtgcgatatcacgactggcgactgactagtaatataagtaatcacacctgtatacacttccgcacacctgccccaacaatttgaaactatccaccgactagaaacaggtatacaggacctgcactgtacatcaccctgacaatgagtctaggaggtatcggcaggcgtgaggacttaatactgtgcactgtgatcatgcccggacttcacgctgatctgatctttcctaaaaagctcctccaacagtccaggctggcagtggccctagaattagtgatggtatgactgaggatgactacttacgtttgacaagagtaagttagaaccgagctccgttggcgagtatcagccgaacgactagttctgagccatggagctggtctcatgcccactctacagcgtacacaaacgatgggtgctcttgcgggtttcacctccgggggtctgctcagtaaggaagatgatgacctagacgaagacactcgctcatagctgctcttgacgcttgttgggacagcctttgcggtctcgcggattgtacgacctcgacctacgcggaatacccttttcttgactttcttgtgtgagttgctggctgattggcggggatgacgagatgctgataggctgctggtctaagcatcgtcgttcttctgctcgatgcttacctcgcacgcgatcttgactgcatggatccgcgatgcacgagccaacctcggagttcttcctgcaaagagcgccgatcccgatctgcagtcttggcaagctgctcaaagccagactaggcataaccaagagagtggagtcgcgggcttagaggagtttcccgacaagtactcgacaacgagaggagaccattgacttgtgattcatcgtaattataaaattgttcgacatgcaccatctgttaatctactcgaagtgatagacattctgcgaacgccgcaatcaggcttcaacgggtttcccgtaatgacgatgttcttagactatttggctatctccgcgaggaccgcgatctctggtcctgtcgatttccgcgctttcgctggtcggggctttcgcatcagtgtcggcgcgattcccgtccaactgccttatctcctcatccaaatccaagtccgcctcgctatcgtccagctgcccatagttcgctccgtgtgtcgcttcgttgtcccaatcgataccggttgcgaggtctttaaactccttgggcatgaagtaaaagaagctcgcaagtgcgaggcagcctcctccgaccacgtcgatcaagtagtggtgagtcaagtacatggtactccagtacaacactcccacataggtccagtacgcgtagcgatacttcgggaagaaatgcgttaagaacagggcgtccatggttgcgcatccagaatgcagagatgggaaggcgccaaacactaggggagccgatccgaacgtatttgtgtaacccttggtcccaaagattctatcgatccgcatgagtccaccgggagagccgggcatcgaataattcgccggtacgagtccgtgaatgatctcgtaccctatagagtacgaccaaccgaacggttattcaagtcaaagcgatattacgagtttttgattgtactcacaaggagccgcacacggaaagaaaatttgacatagcacgccgaccaggttcataaacccgaaggctttcccgaagaattgggcagagcctttgggcgcgaacaaccacaagacgagcgcaatgatgccaggaatagcaaaatgcccgacgccatagggtaaccaggccaggacatcgagtaccggatgggtgtaacgagtgagaagatcagaaatgtttgctccgtacaacacggattccagggtcggcaggaggacgacgtggatgttcggcctccaagaagagggtatgtatctcgcacagaagaaggtaaggacccacatcaggacaggtgtggcggggaagaagaattgcgaggtagcaggaataatgatggctgcgatatacgctgtcggtatgacggccttcaacaagcgtgaatccataatgtaaagattcacgcaggcgagaagcacgaggccgacccaaagcgcagtgttgtgtatcgtcaaagggtgcttttgcaaggtcgacagcgtcttgcgcggatccatggacctatcgagccgtttcaacccaacgatgattcgagcaaccagagccgatagcgggttcgctgccgtggtcgccatgttcgtcggtactgggattcgcagggtgcgaaagagccttgcaaaaggcgcaagaagcattctgcccatggaagcggttgggacctgggtctgtgaattggttcgctgcatcgcagggctcaatgaggatgtcttgtaggtcgtgaggtgttcggatgacgactgagaggggaaaagcggttcctgctcgtgaggcatgcaagatgtttaatgctgccgtgtcgagtcgccctctcaatatagcttgtcgaatttgtcgcggaaagagttgtcttggtacgacgtaaggatccaagagggtgatggaatgtcttcacgagaggtcgacaacaagttgcaacttggcagtactcggtaagctcatggttatatttgattacctctcgatcgattgtactgacgactaactctgtatcttccaacagccggtgatgatgacgcggcggacatctggtactatcatttggtagcagctaaaggttgcggtgtttttaatgtccgcgcattaatctcgaaaccccgcccccctttcggccctcgccgttgcatcgttgctgaccataatcatcatatcatcatcgaatgcatcgaaacaagataccgaagtcattgtcgctttgcttatttgccacacacaacatcgtgccgccatctcgattctagaatctctttctaacgctgatagtcatgagtacgaaaacgttagacaactccaacccaaccgtgcatgcaaccctcacgaagtcgcacgcggaaaaaccagcgtctcaaagcgctctgttggctagcctctggaagacctcaaatgaggatggtgtcgagcaggggaacgatatgaagtggatcagacaggtcgcatccgaaaaaaattattacgatgtcccaagccgatcgaacgacgccgagagggaagagatagacgagctcgaggtctttggtgagcaggggagtcattcgttcaccttgtcctcctgcttaagagggaccactcctagatttgctccggtcgatcaccgatccggagcatcccctgaccctggagcaactcgcggtcgtttccccatcacagatacacgtctcgaacagaaagggcagcgagcgtgtcctggtcgagttcactccaacaatgtcagtactgatcaaagagaggcttcaccatcgggtcgaactcatcgatgatggagatggatagtccccactgctctcttggaacattgataggtctcaccttgcgagtccgtctgatgcgagcgcttcccgaacgatacaaggtagacattcggatacacgaaggaactcatcaaagcgagcatgcgcgtaagcctgatgtggccgaatcctagaagtgagctggctgacagcgtatcacagtgaataagcaattgaacgacaaagagcgggttgcggctgcattagagaatcaccatttgttgagtgtggtcgaaggctgcctaggttcggctggagagaaggctcgctgaaagagattcgagctgccgaatatacacttagcatagtaaccatgcggacggatagtcctcggccgagtctctagagtagaaaccggcaagcagctgcttatgtactcctgttgtaaccgattcgcaagccggcgctgagagaaaagggaatatcgattttgcagtcgatctcacacgaccgccacatgattatctttacaactggtcagacaagacagcacggtaaatcgccagcatacgcgaaccagagaccaagagtcataaatctacgagcaacaaccgcccgaactctgctgactctgaccttgtcctacgttgacgttggtggaacctctcccagccaaacctccggcctgggacccgccggcagcagcagcatccggttgactgtcgataagacgggtcttgatgtccctgtgatatgagacacccgttagcaaacaatgcatatgacgggaatagatccgcattgacggacctagccaacgtgaagaacgcctcttcgacaccttcgttgtcctttgcactggtctccaaaaacctgaggccgaactcgtcggccaattgccttccctgctcgagggtgacagctcgcttctcatcccaatcgcacttgttgccgatgagaatcttgttgacgccctccgaagcgtgctgctcaatgttcgcatgccaggttcggatgtctagtgcagccagaagatagcagatggtgggaatgcgtcataagccatcaaacaacatccaaattagtagaggtacccactgttgaaactcttctcgtccgtgacatcgtagacgagaagaatgcccatagcgccccgatagtacgccgtggttatggtcctaaagcgttcttgacctgtgaacattgcacggccgatcagctgtttgtaatgcatctctgatactcgaactcaattgtaccggcagtgtcccaaatctggagtttgatcctcttgccatccagttcgatcgtccgaattttgctacaagacctcgccgattagatccgcgttcagaccgagaaataagcgccttggcaggtactcacaaatcgatacctgtagacagacggcaggtagaggacgggcatttggacgtcagggcgggtaagctgatggctacaacgaaaggagacgcaccaatagtcgtgatgaagctgggagtccaagcgtcatcgcagaacctgagcaacaagcacgatttgccaacccctggtgtcgtggatcaatgaagacaacgagaaagattgaggatacaatttaggctcaatgagcgggaccttctacgtaccggagtcgccgatgagcaatagcttgataaggaaatcgtagtgaggcgccaccatgatgatacggcaggagggaagcgaacctgaggcgaagcgtgacagaacgatctcagcgggctgctagtgatttgaatggtgtctagtggcgacttactatcagacggatgagcgagatacttgggcggatttccttggaaagaacgtccactgagaaggggtaatgggtaggccgaattggggtttcgggcacgtggacagaccgaatatggtatgttaagcttgaatgtcgactttggtcgacagggcggggtcagacgtacgaattgaagttgtctttgtgctttgttgtggttgactgtctgacgatcgatgaggaccgattgatggcgaccgtgttcaggcagcttgaggtggttgaacacttgcatgcgtgacgacgtaccgaaggaggtgtgggcagcggggagagacgaatgaggggcaggtagggcgagagctgcaggcaggcagggccaaggaaggggggcgaacagggcagctagctaacgggtctatcgcgtgggtccatctctcatctgcatccggacagcgagctccatgacctggccctcgcgcattcggctcgaggtggtcgatcatcctgcaaaccgacgctgcaggtcaaggatagacgttggaaatgctgacgatcgatcgacagcgacaatatgcgcaggacgagagagtcagatgtatgaagggtatgtgtatttggtttggcatatacagtgaatttgtcagagctcaatcaataacgcctcctccgccacttcccttcgcggagcgggtttggtgtcaagatgaggtagtgcgtgattgggggcgtccggcagtgcagggagttccagggtggttgaatgttctggaagcactgctgcccactgatcgccttgctgagggtaagctggtgtcgacgaatgcgcaaaatgatttggcgcggccaaatccgcttgtgctggtctcgtggataaaacggtcgaagggggagctgaagtattgcgtgactgataagccgagccggcaagatgtaccccttcggcaggctggagttgtgtttgcgggttcgagcgctcggagctcgattcgatgccatatgcgacactgtgagcggtcgcagtctgcgcggggagaaacggatgtgtaggggaggggcgagtgtcctgatcagcgtgagggtgtgacattggctgttgaacatagtgatgctggggaatgctgggatagccagggtattccggaccgggcacaggcatcgctcgatatgccaatggctgataggtactggtaggcatggggtgccgattcctgaacgcttcttgctcctcttgtagtttgtcatatcgccggacgacatgcataagccgatcgtgcatctctgccagcatatctaagagttcatgagcgttagacagcgtgccgcaaatgataaatagctctgattttgcgacccacattgttttgtcgccttttcctggacgttgctctggagctttcctgcaatactatttgcttgttcgtatagtggatatacgtgcgggaagcgctgaagattctggtcgccaaatccgaccgcatgctcgatcgtctgagcaaatgtaagcatggtttccgtctctcttggcgacaagtcataggttggaagcggctgtcacgatgaaatagtaagttagctgatcaaactttactctgtatatctttgagaactcgtgtaccttgtaatcctgctcttggtcttccactgctccgggcgcagacggcctaacacgattcatatccgccaagctggcctcaattgcgagacgcagctcgtcgtcctcgggatcgattgcgtcagtgccttcgagtttccgaccatgcatcccaggatgcgagcccaccatcgaagtggcgtggtcaatagatgttccctctgccaatgacaaagcgatcgctcgctggagatccgcatcaaattgttcggcccggactgagcgttttgcagggatcgaaggcgtgttggggtcgtttctatatgagacgcgacggctcttagacggccggcttgaataccaaagtacttcgagatacgcacttgctcaacctttcaccgcgaccccctttctgatagcacggctcgcaaacgcggacctcctggacgattcctagatgaggtaatggcatagtcttgctcgagcaagcttggtcgaaaaccagcccacagttgcgacaatgatgtttcctgttcgtgaatgtgaaggcagaacggcatcgcatgcaggagtctgcgtctatccaggttggcggagtcgccgttgtcaggaggtggttggaaacagacttcggggcggggggaaatgtaacccctattgagtgcagaagcgtgttctctgcggatcagtatagaagggctgttggtaaatatcagacagacgtaccactggctttgagatcccggtaggtttcgggaagaaagctcagagagctctttggttcgaacacgagagcccattgttggaaaagattcaaggccatctcacgaacttgaggcacagtggcctaaagatagctcgtctgagttacaagaagcatgtgagcagtttggaggggcttacaggtgctttgatcaggttgctcatctcgctaacgaattccttgctagctatctcttgcagaaaatgatcacctccgttcttgatacaggtatccgtaagctgagagatagaatatgaaaatttgagacgattacgggcgaggaatgtgagtctgagtccactcacgccaagagcggccatctgaaccctgccgttcttattggccagtcgggtcttgagactctgcattgctgacttgggcggaacggttttggagcgaatcaaatcgcaaatttctagattgagagcaatgtcctccgattccggccaaggtagattgagcggcgagcatgctttctctgtaccaaagtgaaacacgcaggatcaaccacaagatgactaagcgatatcgatcctaagaggcgaattctccgtaccgaccagatcctctagttgaggattcagagaagaaccccatatccaagaggccatagcgagtgtgctacttcaatgtcgcttgaggatgcctcgcggaaatgtacggtttataacgtgacttgatgcccaaaaggtgttactgatctgttgctccttcaggtgccccgacaatacagctctccgactgacggaagccgtgtcgaccggttcagcgaacctcgctctgttcgtgagtaactcgatagcttgaagcaatttaggctgctagctgacgcaacgctcgagtctcaatcagctgcaaaacgaaatgaatcctccagtcgtatgttgcccgccgatgggtcagttggtgatatcatcatcctgtatcgtgagctgctctcctgcccggacgtcgggccaaacccggcgacgcgcgtgagaaagcgagtttcgcaacacagaccacggttgcatgtaggttgcgagctagacatgctagacacatgcatgttcaggtcgaagagtacaacacgatcgtctcgtgcacgattcatgttgccgccatagtatcagcttatcccaagctcttccgatacatcatagtctgagcgctcgcgttcgaacataccgatctcacggatagctgagccacaagaacaccgagcaaagtcgtagccccgtccggaggtcccgcacccgttgcctcttgtcggtagtcttactcaacgagacgtcgacttgccgctccttccgccaacatcgttgtgtccttgacctctccaacacgttcatcagatcataaagacaagatctcctcaaggtctgctgttctgacttgccttttgagagctttaagttccaagggatccgaagccttcgttggcatatcggtgcggcggaacgtctggcctctacagcctgcttgcattgcacaatctggccaccagggctatcttgaacacgttcaaaggcctccaaattctctcacttgctctcggcacaacgttcaataagctgccttcacgatgccattcacgcaatcgaacgctcctgttcgccctgtgaaggaaattcaattcggtatcttgagcccagaggatatcgtatgttactcgccgatgcacctttctcctcatctatcattgccagtatgtagtatatctgagctctcgctgaatcgctgctgttcgccactccctttcagaaagcctattcggtggccaagatcgaattcccggaggtgaacgatgagaacgggaagcctcgaaaggggggtctcatggaccctgtgatgggcagtgcgtattacaaagcagaaatagagtgtcaagttcgagccgctcatacaggggacccccgcagcgattgaccgaaacacaagctgcgagacctgtggtgaaggcatgtctgaatgtcccggccactttggtcacatcgaattggcccggcccatttaccatccaggtaagaggagacccttgagtctacccttgaccttttagcctatcgcatatgtgtccctatcagggtttatggtcaaggtcaagaagatccttgaatgcatctgcacgaattgcggtcgactcaaaattgatcaacaggtacgaggcgagattgccatgtcgtcaaagcgggactctgcgactgactcacatatatcttcacctccgaacatcaaaacgaacctgtcagatggaacccggactatgggaattgctcgcaaggcttcagccgaagtatcgtctgaaatacgtctgggaaaaggccaagagcaccttcgtctgcgccgagaccgacccggcggacgaagacaatcccatgcccatcggacacaacggttgtggacatcgtcaaccgttaatcaggaaagaaggtctcaaaatgtttactgttgacaaacgggttggcgaggaagaggactcgaagaagaaaaaggttcgtttctcatcagcgagagcgacattcgtcacccatatgcttattaccgcgcatactcgaatttatcgacaggaaggacccgcgaagcctgccacggataagcacttttactcagcttttgactgctacaatctgttgaagaaaatacccgccgatgatatggacgccatgggcttgtcggcggaattcgctcgtccagagtggatgatattgaccgtcttaccagtaccgcctgccccggttcgtccatcggtagcgtctccgggtaaggcaagcgcccaagacgacttgacatacaagctcgccgagatcatcaaggccaacgggagcgtcgagaaagcagaacaggagggcagtccacaatacatcatcaacaacttcgtggaattgcttcaggtttgttacttccactggaaatgcgcgagacgcgccaaaccgagctgaccgatcaagcgtattctagtatcacgtctgtacctatatggacaacgattacgcaggcgtaccgacctcgaagcagaagggaggtcgtcccatcaaatcaattcgtgctcgtctaaagggcaaagaaggccggttgcggggcaacctgatgggcaagcgagtcgacttttcggcacgaactgtcattacgggagaccccctgctcgatctggatcaagtcggtgtgcctcgaagcattgcaatgaatttgacatacccagagagaggtgcgtagatgaaagacgtttttcttgcaaacgctggcattcagccctgatttgcgtcatgattttgcagtcacggttcacaatcggtatcgcttgcaagagctggttgagaatggccctgcttcataccccggcgcgagattcgtcttgaaggactctggcgagcgtatcgatctgaaataccggcgttccaatgtcccgttgcagttggagtacgggtggatcgtcgagcgacatctcgtcgatggcgagtgagtcaaacgtgcctacatgaaaggtttcgttatcagcgataacaactcgggatcgccctttccctccagctacgtactcttcaatcgtcagccatcgcttcacaaaatgtcgatgatgtgtcatcgtgtcaaggttctttactactcgagtgagtgtttctttttgactcaacgagctgttcacgttaaggcttacacctggccgcaccgcagccttccggctgaatctctcggtgtaagacttgcctgagattcgcaccatttgggaagcgctgcttatctgcttgcttcgccttagcacttcgccttataatgccgatttcgatggggacgagatgaacttgcagtaagcatgaacggtgtagagtcgttcgttgggcacgaagtaaacaacctgtgtcgcttgaacagcgtaccgcaaagcgaggagactagagctgagctacagcaaatcgcttgggttcctcgacaggttcgccgcggacgtccttgagagtcaacgctcagctaaactcccccttaatcgattgtccacagatcatttcccctcaggcgaacaaaccggtgatgggcatcgtccaggacactctgtgcggattgcggaaattcacattgaaggacggattttgcgattggacccaagtgcaaaacatcttgctttggctccgcaactgggacggagtgataccgactccagccatcttgaagccgaagcctatgtggactggcaaacagctcttgagcatgtgtatccccaagggcatcaacgtgtccaagttcaattccagtaaaccttcaccgatcgacgacactgacgaaaatgtcttggtcgaggacggagaaattcttcatggcacaattgtcaaggctatggcaggcgcgcagaataacgggctaattcatgtcattttccgcgagaaaggacacatcgccgcacgggatttcttttcgactatccagaacatgatcgacttttggctattgcatcacgggttctcggtcggaatcggcgacacaatcgctgacgttactacaatgtcgatgattacgaaccgtctacgcgaagcaaaagaagaggcctcgctcatcatgcgagaagcagagcagaacatcctcacgccagaaccgggaatgaaggtccgggagacattcgagcacctgatgaaaggagagttgaacaaagctcgagatttcgcgggagagtctgcgcaaaagaatctgaaggcggacaacaacgtcaaacagatggtggtttcgggttccaagggatctttcatcaacatctcacagatgtcgggatgcgtcggtcagcagaacgtcgaggggaagcgaatcaacttcggcttccgtcatcggtccctccctcacttcgctcaggacgactttggtcctgaagccggcgggttcgtcgaaaattcctatctgcgtggtttgacccctcaagagttcttcttccatgccatgtccggacgagaaggtctcatcgacaccgctgtcaagactgctgagacgggttacatccagcgaaggctggtcaaggcaatggaggacgtcatgatctgttacgacggaactgtcagaaactccgccggtgacgtcctacaaatgctttacggcgaggacggcatggacggagctgctatggaaagacaggtgagtgcatggctcgagctagaagagccaaaccttcttgtctgaccaaattaatcgcactccgatcagaccttggatatcttgaagctatcgaaagacgccttcaaaaagacgtacaaggttgacctacttgacaagaaattcgacttgccgaaaaatctcttgcaagctggcctgctagccaacatcccggacgtccaatcagttctggatgaagagtacgccaacctcaagttttaccgacgagagttgaggcggattttccctgacggggaagcctctcgccccttacccgtcaacatttcgcgtatcattcaaaacagccgtcaggtgttttctattgacacccgcaagcccatcaacctcagccctgttaccatcgtcaagacgatcaacaagttgtctgaagagttgatcgttatgcgaggtgacgacgccctcagtcgacaggctcagaagaacgccacgatcctgttcaaggctctactttatggcagtctagctgtgcggccggttctcatgcggcaccatctgagtgctgaagcgttcgaatgggtggttggcgaaatccgaaaaaaattcatgcagtctgttgccgatcccgcagagatgtgcggggtattggcagctcagtctatcggggaacctgccactcagatgaccctgaataccttccactacgcaggtgtagcatcgaagaacgtcactcttggagtacccaggctgaaggagatcatcaacgttgccgagcgaatcaaaacgccgatcaacaccatctacttcgactcgaatatcaatcaaagcaaaaaagacactaagagcatgacggctttgttgaaatacgtcgacatcgagcgtttgacctcgaaagttgagatccattacgacccggctgtcaacagtacatatatcaaggaggacgaagcattcgtgaaagccatgtgggaaatgccagatgagcggaacgaggccgtccttgaccgactctcaccgtgggtcatccgattcgtgctggatagagccaagttgcaagatgcggaaatcgagatcgatcaagtggaacgtcgaatcaacgagattttcaatctgggatcgcacgatctgcacgtttgtccctcgacgcagttgtcacagcagctcgtcattcgagtgcggatggtcttgcaagacaagagcgaagcggaagatgccgatcacgagaatgtgcaagacacgcttagacgtgtcgagaaggcgattctggccatcgaaatgagcggaatccgaggcatcgagcagaccttcatccaggaaggcaaacgtacgatcgtaaaaaatggagactttgacaagaatcacaaagagtggtacatcgagacctcgggtaaagacgccaaggaagctcgcgacactgctagcggcaaattcgccggtttgaccaacttcaaggaggtcatcgctgttgacggcgtcgatgtctcgcgcacgtattccaacaattcgttcgagatgtaccaagcattgggaatcgaagcgggacgagcagccctcctcaaggaattgcgcggtgtcatcgagtttgatggttcatatgtcaactaccgtcatcttgctctcctgtgtgacgtgatgacgcaacgaggcaaactcatgtcgatcactcgacatggcatcaaccgtactgatgcgggcgctctcgcgaaatcgtcattcgaggaaacggtcgaaattttgatggaagctgcggcgatgggagaaaaggatgactgcaaaggcgtggctgagaatgtgtacgcatgctggaactcatccggcccccactctgcctattcgctgattgttttcttctttagcctgattggacaagtcgctgagatgggcacgggtctttgccaggtcacacttgatcttgatcttctgcgagacgtgcagccggatgctcagggcgacttggcgcgttggcaattacagcaaggcggcgcgatgacgcctggcggcggattcagtgctatgatgacgccttacgatgatggtagcatgccttatagcgataccggaaagatcttcgatgcagctttcaggtacgacatgtgctttccttttggcaatgcaatggctgattgcttgctttgatgtttcagcccgatcggcgcagccggccacgacgacgcctttggcgacacgatgccttacgggatgtcgccgattgcccaaccgagcccgcgaggcgccggaagctacagtccgtccagtcccggctacagtcctaccagcccgtttatcaggtgaatattctagaatcaagggtcaggctcagtcactgatagacgtcctttctgaacagctcgccggcttatggaacatcgccagcatcacccgctttcggttcctcgacgccctgggcggtcacgtcaccaggatattcgccgcaatcgccctcgttcggagtatcaccagcgagccctaatttctctcccagttctccgcaatattctcctagctctcctacctattctccaaccagtcctgccggccacggccgcaaagcatgggggccgaccagtcctacctacagccccacgtaagtcaagcgcttctgatcttacgcgcgtccttgctcgccttgattcacaaccacatgccgcatttcaactagctcgcctgccggccagtactctccagcgtcgccgcaatactcggtgagcctcgcgttgaccatctaatctccacttgatcgttactgaactcgccatgttgtggtctgctcgacgatagcctgtttctccggctttctcgtcagtcacaaccaaggctgcccttggcgcgacgtcgtgctgattctcttatgtcccttagccctgcatcaccagcattctcaccagcgtctccggcgttttcgcctgcatcgccagccttctctcccgcttcacctgcattctcggttggtccgatcctccttgctgtacgtgatctgctgcttactgaatacgttctacaccaaatcagcctgcaagtcccgcctttagtccagcttcgccagcattttcgccgacatctcccttggctggtggagcttactctcctgcttctcctgcttattctcctgcgtgagtatctttccatgacgattgcgtgaatccgtgtagctgattgcgttaaaactttcacaggagcccagcgtactctcccgcgtaggtcacttgcagggaaagacgacgcaaaaccgatacctgatccataccgttacggatttgtcacagttcacctagctacagtcccacatcccccgccggagcctacagtcctcagtaagtgcagttagatggcatctgccgactggtctcgctctgataagtttcaatcattacctttcgtatacataacaggagtccagcgtagtaaataacccatcgcctgcaaaccttgatcattcacctgctgattagacgaactttttgcaaatacagctcgccaacgagtcccgctttgtgagcgagcatgcgaatcattggagtcgagcagtctagctgatgaccagcatactttccaatagctctccaacatctccgcaatattcgaatggcacgaacaaaagtcctgcttatagtagctacaattccgcctctaatcaagcgaggaggtgatagattgtctgtcgactctcgctatgccaccatggccgttcgttcatgtacagacaggtctaccttgcatgacacgagactaagccattgcgagccctaggactggtcttgtaactcgaatcatatagtggtcctagccgttaggcaaggcttttggctcgaccgtgaacggagcgtcttcttcatcttgtgcaccgagcaccctcccctttgcgccatctttcacctcatctatcgcgtttagagcaagtcgccctttatcgaccatactttccagtctcgcgttggcgcgggtcatggcatccccaatctgagagatgcagtcgagatagtcgtccatcgctatatcagaatctgtctccggagaggtactagaagatattgccagccctggctgcacgtgctgttccacccgaaaggtcgatccggaaggttgtccagaatttctgagctgccgcctgagcgtggatatgatgcggtctttccttgtcacttccgctgcgccgacagccggaacaccacggtgttactctcatcaggtcaccgtccacggatatttcgcacatattcggacgtaccttcatgctgtcggttgagtgacatgagcgatttgttggtgatcaataggtctgcgtactgatgcagaacagccgggctccgtatcagcttcgagttaaagtgatcttacctgcgtgatgtcctcaccttgcgatctctcttcgcttctgcggcagcggattcgacatcttcggcgtccttctcaccttcaacagacgagggagaatcttcgggtgagcctagttggctgttgccgttgtaagagcatggggagaggtcccgagttcgagcttccgtctgtacttcgtctaaattcatacccgtcgtctgaagatatggcagtgcctcaatatatgccgtaggtatggacccgcgacgccccctgtccagatcaagttgtagacgtgccttcctagcgctagtacgggcgggagatcttggagataccccgcatctgggctcatggatcccattctgggagttatagtcgggttttctcatgcttctcgaaggagttgcggtaccgtcccactggggaatgattcttgcatctccagatgggtgtgaggtgctgcttggtagatcggtagatttgactttgactgatgccgatgccgtcgtactgttacgggacgccaacgccgctgcttcaggtttgaacaggggctgcgggccgtccttgacgacattgctgtgtttagctgatcgcacattagacgtaaaacgctccgagtgtgccgcgatatggcgggatgtcgagccataagttggaaattgggcatcgctttgagacaaagcatgcgaccttgggccgatacgaggccccgaggatgaggctcgataatccgaatgctccacggatactttggctctcggtcgggtcgaaaggccaggagcctcgttcgcccaagctgaagaagtgcccttgttgacgagtcctggaaccgaacaggatgatctcaacgagggtcgaatggctgtcgatgcagcatgaccagtctccagctgtctcgccacctacagggaattgtcatactgataagctatcgctcctccgtgggttctgatccgtcagagccgcctgtacaggaccagcttaccttgcggcggggttgctcgttacattgcatactcatgcgttgcgtctgcgtccgaatgctgaagttacgaaatagatcctatgcacatagctgtcattcttccatgttctcctgcgagggcgagaaatgatcgtgacggcctgcgttgcaccagagtccctcgtcgttagattgatggtgtacgtctcttcgccggagtcgttgcgacagatctactttctaaagatgatatgtgatcggggagctccgcggcgatgaagtgatgtttgaatccgaccgcttcgccaaacaggcgcgcgtctgacaatcgtaaatgaatcccgagggcttgctgtccaaagtagtagttccctctttccatctgtacagcagcatcagaacgatgctttaagttcatggtctagtgtttttaccgagaacgatggggataccatttttttactgctcatcactatgcttgctttccaagaggtctttgtggagggaacttgtcgccggatgtcatcgcatcctgagccatctcgacatcgggcttagcatctgcctgccaagacgttttggtttttgggtgcctgatactgacatcccaagcgcaaacttgaaacataagacaactgtcacaggacgccttcggctcgcatcgggcgttacccgctggacgcgacacgtgaccggaataacgcctgtgttcaccaaacaagcgtgttgattggctatccactgtactttccggtacttatttggagcagatgggggaaagacgcgttgagggagaaaaggtgaactttgggggtgacggcgctcatcggtacggtaccgcacaagtatttagaggagatgtgccatttgtacgtagaatgagacgcttgagtgctgtgaggacacaagcgttgatattacgtctctttgacacttagtgtttgacaagagttcaggtcatttcactgacgggtaacctttgataaggacacttaagtatggttaagcaatcttccgtaccccatctcgcgcgcggttatccctgccgtgacaagaacgtgacccctgactctggtgttaagagcactcgttatgagtgttgcaaataggtgtgccatgattggctcatggatgcacataggaagcaatctcaagcacaaaaggtcaacatgtgactagaatcacatgttgtgactggagttacgcatctgcaactgaagtcacgcttatgcaactggagtcacacatttgcgactcatttgcgactggagttgcacttatgcgtctgagtcgcaaatttgcgacaagcctagccgcaagtacactgggaggacactaagaggacatgctcatcagaatagtatatataggagaccatctggacgtcatttcctttccctctatcatgtactactttacttttagacaagcaaccttgatcatcctttcacaacaaggcaacatctatcatctgcaagagacaatagacatagtgactacaaccactaccaaggagtggctacgcaccataggcagcagccaatatcacaacaggtcatgagcccagtagttgctccttgaactacatatcaagtcacctctctggatcaagagtaggatcaagagtaggagatagaacacagcagacttggggtaacaggggtcccaagtgatcaggagaaagactcagggtaacaagaacctgagcaaaggagtcttgggttaacacagctcccaagcagagtcagacttagggtaacagggaacctaagcatcacagataagtctcagggtaacatagggcctgagcaagagaagccttgggtcaacataggtcccaagcatcaagacaatccttgggttaacataggtcccaagcacacaagaagacaagccttgggttaacataggtcccaagcatataagaagacaagccttgggtttgtcacgtgactctagacgcgcgcgccctctagtactaggtacttagaggggtaaaatacttagacatatattcatctctcttcttacatacctattgaacttcatcaatctaattgcatgttgttcaataggtaagttattggcattgtacaacttaatgatattatcaatctaattgcatgttgttcaataggttatgagcccagaccgggttcccacgaccaagtgatcaacgcgtacgatcacttatcgcgtcgaggatagacgttcgccaccgtctattcccagtcaaccgaacaacttatatcgaccacagtctctcctaacgataccaaaccagtaaagacactgactaccgatttaccgcaacgaaaacgaaccaaaaccgagaccgataactacattactacttccgcgtatcggagctgaatcagcccgaacccctactgtcgtttactcaatcgaaacaaccagtagcaccacacggactacgctattcccttcgacttatcaataaaccatatcgaacccatcatgtccgataacgagatcaacgcaaagcccaaagtggtcacacttcaaccgggaggattgaactaccgcgagtgggagttcaggctgaagaacgtcctcgggtaccacggcctcgccaggatctgttacaaaaccgagggccaagatgatgtcaagaaacctagacctggaaatgccggtaaagcccaagatgactgggacgaaaaggcagaccaggccatcgccatcatcagtacttcccttggctccaatgcaagcctcatcatggccgccagtgagcccgccgaggcccttgaaactgtccgaactctctactcgcaagcgaccaaacacgatctcagcactctcatgaatcagtgggttgctctcacccccgaaggagacgatgttcctgcctacattgtcaagttggacgccatccgctccgacttggcttctcttggctgtaactacaacgaacaaatgatggttggacagatccttgaaaggttgagggaatacgaccccaatagcgtctacggagagacctaccgcaacctcgatttcaagttccaggacgatcccgaccaagtcaaccttgcctacgttcaacgcttcgtctcctctgccttccacaagatcaataacgccgaaaaggaagcttacatgtccgacaaagcctttatggctgctgctcacaaacgaggcttcgtcaaacaagctacagacgggaaacgcggtggtactcaaggcgcaaacagagccagtacgcagcagaagtcgtcttacggtgccagctcgagttggttgtctaacaactcgggctgtcgattctgccgcagcaaggaccactggatcaaagattgtgatcaccccgagtacgatccgaaagtctgggagcaacattgtcagaaagcaagggagaaactgagcggagacaggaaggacgatagaggtggaccgagaaacatggaccacaaagccaatgtagtcatcgccacttccgttgttgatgagatcgaagagattgacgcttacgtgcccggcaaccatggcgaatccccacgccccatacccgtaaacgtgatctccacactctcaactccagctatttctgagtatctataccgggcctcgatctcacaaagaggttcaatcctagactccgggacaaccagtaccatgtttcacgacttggagtggtttgaactgtcgccaaacttcaagaaggttcatattaaaattgaagtcggtaacggagaggtgatcgcagcggaaggcatgggcgacgtccaggtaaacgtgagattggataacggattgacgactacgacattacgaggttgcctatacgtcccagaccttaaatccaacctgatatcaatatctcgcctagataaagaaaaacacagcatactgtttggcaaagggacagcaaaggtgatgcgggcagacagaatcatcatgattgggaaactacaagacaatctctatcaggtggatatccgaccgacaagaatctccgaacacgtgaatcttgccatatcgagtgaagtatggcacaaaagactgggacactatccaccaagaaagctctcaaagctggccgaccatgtacatggcctcaaacaggagcgggtacatgactctccgagatgcgaaagctgcgtgcaagggaagctagttcgtaattcatttaccccgtcatccaccaaagcaaaagctccactggacgcaatcagcatcgacttggcgggtccatcaagagtagagtcgattaaaggagggaagtacttcctaatagtggtcgatcatttctcgcgatactactgggtcgacatactcaaacaaaaggccgacgcgtttgagagcattaaacgcttcacagagaggtacgaaactcaattgaatacccgtctgaaggtcattcgttccgacggaggaggagagttctgcagcaagaaatggacagaatggttgagccggaaagggattatccacgagactactgcaccgtatactccagagcaaaacggtatagcagagcgagctgtccgcaccctcaaggaaggagcgagaacagctttgattgactcatgcttgaaaccgaagtactgggccgcagcggtcaagaacttcgcctatgtcagaaatcgtacacttacacaagtgtcgaaagacaaaactccttacgaactgtttttggggaggattccggacgtaggacatatcagagttttcggatgcgtggcctatgcgcagatccctgctcaacaccaatctacgtggcattcgaaaacgagaaagtgcgtccttattggtcatgcacaggacgacgaagagccaacgaaaggctacctcctatacgacccatacaaacgcacaacgttcaagtgcgtaacggtagacttttgggaaagccagagatggaacgatgctccccaacttcgtgcgagggaagatttcatggcccccaaagtagaggaggaagaagatgacaatgactggcaacttcccgaaattttgatcgatggtaatgaaggaccacaaccaccactcgctgccccggatataaatccaggaccggaacccgaaccagctcaaggggaacttcaaccagatcagccggcagagcgccctgtcgatcaaccagaactacgtcggggagagcgagtgcggaggtctccaggaaggtggtgggaaagtgctaacaacgcagtcgcacatgaacccctggacaaattacttcatagagcgtacgctgcgtcgcagtacaagcaaaatgacaaggagtttgtcacctcgcgagacgcagaaattgactccatgtataaacatgaggtatgggacttgacgacattgccgcaagggagaaaagccatctcgtgcagatgggtagatacgatcaaagatatgcccgacggaagtgtgaagaagaagtcccgactggtaatcagaggattcctacagaaggaaggcatcgattatcaggaaatattcgcgcccaccataaaaatggagagtgtaagagtcatacttgcgatcacagcgaagctagatttagagctcctccaaggagacgtctccaccgctttcctaaacggtcatctgcaagaagaagtttatatgactcaaccacctgggtacgaggaaccatcacaaccggataaggtgtgcaaactcaaacgcacattatacggtcttcatcagtctccacgggaatggtataacgaaatcaagcgccgactagaaaagataggaatgaccaatacatcggctgatcattcaatattcgtcaacgtcgaagacaacgcaataactattctcggagcatatgtcgatgacttcatcatagctacaaactcaccatctcaactcaagaaagtccgtgaatacctatcaggatgcttcgacatgaaatggatggaaaacccaaaagtcctattgggaatcgaactgttgcgagacagaacacgaggaaccatcaccttatctcaagcgaagtatgctaccaagatattagagagtttcgatatgctggactgcaaacctgccaaatccccactcgagtcacttgaaccgggactacctgagaaggacaaacgattgcctcctgacacgaacctacgatatctggaagcagtgggaaagatcaattacctcgtacggtgcacccgaccggatttagctttaaccgtgtcctaccttgcttccttctgctcgtgttaccaactggagcactgggagaaagtggaacgtgcgctacgatatgtgaaggacaccatagacactcgaatcacgtatagcagggaaggagaatctcgactagagggatacagcgacgcagattgggcccacgaccgaggcgatcgacgatcgtctagtgcgtttgtctttactctggccggaggccccatctcctggatgtcgaaaaaacagagtatcgtagcctggtctacgactgaagcggaatacatagccctcggcctcgcaagccgtgaggcgatctggctcaataaacttatagacgaaattggttacgcatacctcacaaaacaagggaaggaaacccttccgatccgaattcacgaagacaaccaagccgcgatttcccttgccaagaatccggtgaaccattcacgaaccaaacatatagacatcgcacatcacggcatccgacaatatatcaacgacaacagcatagagttagcatacttgaacacgacatccatgatcgctgacggccttacgaaacccctaccgggacgacgactcaaagaactttgcgaaatgatgaacatgcgctttctattgccagcgtaggatcgagcacgacaccgacgcctcgagctcgaagggaagtgtcacgtgactctagacgcgcgcgccctctagtactaggtacttagaggggtaaaatacttagacatatattcatctctcttcttacatacctattgaacttcatcaatctaattgcatgttgttcaataggtaagttattggcattgtacaacttaatgatattatcaatctaattgcatgttgttcaatagggttaacataggtccaagcatcaagacaagccttgggtcaacataggtcccaagcacacaagagcaaagacttgggttaacacaggtcccaagcatcagcaacaccttagcaagatatctatcagggtaacacaggacctgaataccggaatcaccagaccaaaatgatatacctggaacaaaaaacactggactcttgatcaggatgacagaaaccactaccactgccatctccaagtatggaatccctacactcactgggattggcaactactatgagtgggaaaagtgcagctcaagatgccatcttggctttgggtgcactacaggttatcactgatcacaagaaggaggaaccaaagactctagcttaagagggagctagaaatcttactgatgatttgcgagtgggcccctcgtaaggtatgtgatagctaagtttagtatacaagtcttgatgacacggagtagaggggtcgtcatgaagacacatggaaagtcagttgtagcgtgcgtacatatgataggcccacaattatgttctatatattgcagcgttgtctgtctggtacacttagattcagtatccagacaatcagcgagactcgcccgtaacatatacacatgctacacttccaagtcccaggaaagaccctgggttgctagcagcctaacaccctgccgtaataagaattgcgctgagggcagaataaaaagactgttctgtttatcaagtcagcttgctctccttacctcacattgcctacctgatcccttccttctggcccaagctctgacccaatgttagggttaggccttggttgactccttcttaccccacacgtgacttgtactttaggcctagaattgcataacagagccagtactaactttaccacaggtatctacaatatgggatatgcttctctagttgtcatgaccgggtcacttctcggactatctttgctccaccttttgcgctgtttgctggattgctggctgccacctgctctgcgatgtcacatctattcagttcatgacactgacaaatttgttacttcttatgaagctccacttttaggctttgctcacaagctccatcaatcccaccatcctactttaattaaaaaacctctttaggagataagagaccaaacccatcaatagtgttagggtggagagttccattggatggctccactggagcattaagcgggagaggggcaaaggtaggggtcattgtgtataattaataatggatgcctaaggcatccgtatcattgtagtgcagttgaacatcaacagacagactttcacttggggcatccccttggacatttcctccggtgagtcatgtgacgtgccccttgggggtgatccgctacctaggctttgtctctgacttcgctccaaaatccttcaacacgtatatacagctacagaccacactcctttgtactttctcatagaagtctccctctcagaaaactactatcatgtgtcatcaaattgaatgaaacctcggcatgtacaccattgctaggtccacacaatacatagcaagctctctcgctccacattggtacgccaggtgcgccacagggacaatgatccgtgatcttccaaatcttgtcttgtatgcatgtttacagtcactactagataaccttatcgcttgatcagacgcctatataagagtcgacatgtattggcagaactcagtcgatttgtcttgtacagaagagagatcaagcaatattgcatgccatagtgccgatagttacacagacagacacgagtattaagggagaggttaaacatcgagatgtggggactgaagactacaatcagcaactcgacactatcaacaccatcaacactgtgggtattgcttctacccaaccactacatctatgctcatcaacaaacatttaccaatattactcaatatcccattcttagacgtctagatatatcgacagatattactcgttattaaacgacacgccggtagtaaatgttgtgatattggctgctgccaatggtgtgtagtcactccttggtaatggttgtagtcactatgtctattgtctcttgcagatgatagatgttgccttgttgtgaaaggatgatcaatgttgcttgcataaaagtaaagtagtacatgagagggaaaaaggaatgaggccagattggcctcctatatatactattctgatggtagccttcatggctccacaaccccttgaaacctgtacattttacagtgaatcctgtagattgtacaaagtacaatgtacaatgtacaatgtacaatgtacaatgtacaatgtacaatgtacaatgtacattctacagaatgaggctttgtggttgagattgcttcctacatccataagccaatcatggcatgcctatttgcaacactccctctcaagctcaagctcaaagcccttcttctttgacctgagactttgtatgtttttgtcttttcttattgaaccattcctgagttgttgttctcattctgaagtgagctgcatcctgaaaaggatggagtaacttttcaacttctagaatgtcttgtgatccctgctcactccatcactttagatggatgagttgacagttgtgcttgtgtttgatatccttcaatggcttggtaagcatgtctgctgcctgatcattggttccaacatggtgaatggtgatatgtccattgtccaccatgtctctgatgtagtgatatctgatatcaatacgctttgacctcttatggtgagctgggttgcctgccaatgccagagctccttgattgtcacagtagaggtgagtcggcttgtccttgctgatgaagcctagttcctgtagcatcctgctgagccacatagcttccttggccgcttctgctaaagccatatactctgcttcacaggtagatgtggctactgtgctttgcctgatagaggtccatgagactgctgaccccaacagcttgaagcagtatcctgtggtgcttctccttctctccatgtctcctgcatagtctgcatcacagtatcccatgaggctgtgttgactgccttctgtgttgttgtccagttgaccaagggtgagaaccttgtcaatggtacctttcaagtttgccaaagtcctcttggctgccttgaggtgttgttgagatggattgctgctgaacctgctgagatagccaacagcaaagactatgtctggtcttgctgacatggcactccacatcaaggatcccactatctgctgatagagtgttttcctgttcttgtcttccttgatggtgttgtcgtgccttctcatgatagcatcatagagaggcgtggttgcagtcttggcatcttgcatgccaaacctatccagcaccctctggatgtagtcttcttgactgagtgagatggtcttgctgggcctgtgtctcttcagcttgagtccaaggatataggtggcggtacctatgtctgaccatttccatttctccttcgatgcatccttgatgccattgatggtgctcatgtcttgagcagcaatcaggatatcatccacatagagtagtagatatgcccgcttcttctcgtgatagtagagcctggtgaaccctaactctcctaggtatgtgctgatgagctgccaccataccctaggtgattgcttgagaccatagagagatctgacaagcttcagtccagtggacttcttgttttgctttgggtatccatccgggaaacccatgtaaatgtcttcctccattgtgccattgaggaaggctgtatctgcatccatatggtagagctccaagtcctgagctgccacaatggtgagtagtatcctgagtgaggtaagccttgctacagggctgtaagtgtcaaagtagttgatgccatactcctaagtgaagcctctggcgacaatccttgctttgtatttgaccacctctcctctttcattgagctttgtctgaagacccacttggagtctaccaagctagctccctctggaaccttgacttcttgccaagttccagtatccttgactgacttgagttccttgttgatggcttcttgccacaagtcagaccttgcgttgtgcacggctgctctgtatgactgagggtcctcctgaacacctgcagcatgcacacttgccagtgccatttcctctatgatgttcagtctgggtgatcttctcctgatgtcagccctgggtttgagcaacatgggatcctcatcatcagagtcttcttcttcctctgattctcctatctgaggggaaggttctctgtaattcattgcaggtggattatcttgaactgcaggcggagaagttgtttgtctctccctctgctcctgctgatcctgttgatcctcttcatcctgtgaaagatcctcagtcacaggtgctttggtacccgtgtactgcttgtcaggaagatgtccttcttgctgtgttcccagtgggttggtagtgacgggatcactagctccctctggccttctgaacactacatccctgcttgtgagggtaacatctcttccttcttgttgtatgacaaccaagtagcctgctccagtgatgtttgggatgcatcaactttcccttgattgctttgttggtggtgagattgttcttgagtctaccctccttgggcactctaacccagaactctgtaccaaaggggtgaacttggccatagcctggcttgtgcttccacatgatctcctccagagatctcccttgatattgcttgcccatattgatgagggtgcaagcatagttcatggcatggaacgaccacttgtgatctatcttggcagcaatgagcatgctagagcacatcttcttgagtgttctgcttaccctctctgctgtaccagtgagctgaggtgtgtatggtgtggtgacctggtgaactatgccttttagctgcaaatatggcttcatgcctcctagatactctccaccaccatctgttctcagacattgcactttcttgttgaaagccaattctgacaacctcttgaagttcttgaagcgtccaaggacatccattgctgtcttggttttgagacctccaatgcaggtcaaccctgtcaagtcatcaacaaaagtcacatagtagatgtgcccatttatgtctggcttgaggggtccagctatgtctgagtgcacaatctccaatggctcttgagctgccactgagatgtcaccaaaggtaagcctggttgtctttgcaatagcacagacttcacactcttccatcttgaaggtagatgtatccttgtctgtaatatgcaactgtcctgatgctgcaagcttcttgatggtactgacgcccatatggcctagtctattgtgccatccttgtatggtgtccttgtcttggacggtgaggtaggcatcctctgccttgttctcctccatacgctctgatactgcatcttcttgctgttcagcttgactatagtagtccttcctgagtggcaacttgactgccctcaaggttcctcctgcacctgtcttgtagactgggatgttgatgccaccttggctgatcatgccaccatgtttggtgatctgcacatcccatcccttttcaatgagagttccttgactgagtaggttggctggtgcatcttctataagcaccacattgtgtaaaaataaacagtgttgactttttggtaacttcatggtaatcttgcctccatattcagagactgtagcacctccagaggctgtcctgaatctcttggggaaactcagtctctccggctggctgaacacatccttgctgttgcagatgtgcgagctagctcccagatcaacaagccattctatgctctcttccttgaccagagcagcatatccttcttcagagatctcttgaatgactgcgcctgccatattcctgtgcagtgctgccagatcgtctgtgggcttgttgaacccagatctgttctgttgtcctttgggtttgtgggtatatccatctcctatcttagaggatcgacactctttgctagagtgcccttgttttccacagttccaacaagacaggttgtttcttgttgaaggactggtccttgttattcctttgttgaccaaatcctttcctttgcacatgattggttctcttgaccatcattgcattctgcaaccttacttcatcctgacgcttgaggtcagcaatgtaagggttgaacattcccctgagatcctcaaatgtggaagttggttgctgggtgatctccttgatcctttgcagtgacttccattctgacttgagtgacttataagtcacaggtaaagccctaaggaagtaggtagctttatcctcttcagacagcttaaagttggctgtctgggctttcagcagtagtgtgctgaacagcttcaggaacttgactggatcatctccttcactcatcctgagtgtagtgatcctttcttgtatgtctgccttgtagttcctgtcgtccatctggtgaagcttggctagcttgtcccagatctgtttggaggtactgcatcctgcaagtgttacgggaagcgacgcggatccggttcctacgcggccgacttcggctcgcgtggtctcgtcaccctctctacgatcgacacaacgcatattcgatatcaccaccagcggagaacaatagcggcatcgacggatatcgaacaaagacctcatagttcgacaaccaaatacaccgaacaaagacatctcgactcagcagacaacgattcatctttgttagatgaccgactctcgaccctcaattcggttctctttgttccgaattcgcttcaccgttcttggaccgcctattgttctcgactggctacgagtactctcggtttcgtatatatacttagtagaacttgaccgaatccggcagacgacgttcttgtactaggaaggtcaagttccaatatcgcattctatttacgcctactgacttgcgacagcaccgcatcttcaagacgtattgtgaagagattacaacccaggacactcgctaagtagtagacgtctcaccgtttgtactgaacaagctttcgatcctagctacctatagcgacattacttccttatccgtacatcaacccggattcgtatcatcccaaccgaattcgctcccattagccgaactcggcttccctcctgttgtgactacctacgatccgtaccgaccttgcactcagatattcattagacgcgacttagcgaagctccgccgtaacaattggcctcctatatatactattctgatggtagccttcatggctccacaaccccttggaaacctgtacattttacagtgaatcctgtagattgtacaaagtacaatgtacaatgtacattctacagaatgaggctttgtggttgagattgcttcctacatccatgagccaatcatggcatgcctatttgcaacatagtgttctatgtatctggtatggggacatttttgaaggctctcccttagagtctatcacctcatgcgtcttgggggatgccggggtgcagtccgccggaatctctggagtaggtatccaggaatgctacccattggccttgtagcgagtgcgatatttataaacctgtaactgcagaaggatggcaagataaggattagtagatcacaagctgtagtatgtacctggtctgtgcttgattattacccaatcctgaatcactgagtaagcctcttttgagttgtacctatatgtttgtgaagatgagttagctagacctttcctaccaaaaggaccttgactgagtcagtagccttgtgtcacagcgacgcgtatggttcttgaggtttttgtactatttcgtacttaaaaagacgtctgctttgtatttgggtagtatcgaagacgcttgagcgaggctcaagcgtcgatatttcatctcttctttacttttacattacaagagcttaggtcactttacctgacgtctagccctgtaccgttactgaattacccaattatgtaccaacgtgtaattacctctcctccgacttcgcggctagacctcccgtgacacattgttgctagttgttgacgatgcaagtcaaatatcaaagacttgttgtggaaggtgtattgtgtagagcgcctgggggcaaggtattatgctcaatgagaggatttcgaaaggtgaagagaccaccatgagagataccctgcaatatctcttaggatgtcctctatgaatactcatcaggaaggagcgatttggtggcaaatatacaagtcacagctaaacggatacgttccatccatacatccagatgtccatccatccagatctccatacttccatacttctatacttccatactatcggttatcaacaagtctgatcatatggttctgtcaatctgaatcttcttctggatatgtctccatgcgaccagcattgtagtcagctccagtacaggcctggacgttaacacccaagcacaaaaacaggctaccacaacagcccaacttaaatccttcccatagctaagagattgtatagtacaaactattgagaagtcacgatttccctcccaatctttatgactcgactccgttatcttggtggtccgacctcctcaagttgcaagctaaggctgtacaaagaacggtaatggcagacgactgggatccagtttggcatgacttgtttactttgtgacttcaatggctttctgatcggagcgatcttttcaggcacggacgtagtgccttagccgcgcgcgctgctttaggcaacaacaaacaaagctcaagacgtcagggaaacactttcgttggccgcccgaccttcgaacgatcgatctcaccgttccgagcatttacctgataactgttgctcaatactcacaaaggccatactcgtccgacaccatctcagccgtgactcctctgtgtgcccgcctctttatcttacttgctgtgctttctcgataaagcatcagaaggggcaagctacattattcgtcaacaacaacaagacctcacagcataattgcccccagtcccaggctgtataacgctgaagcaagcaggaaacaacttcgtaacacgctgagcacaaggctcgacacaagtacgttgtcaacatgagtactcccgaatccacagcgggcaagacgagccgaggcgagaaccggacacatcggtcgaagccatcgaaacaaggcgaatccaaggaggaggctaagatgataggccaatggagaattgggagaaccatcgggaagggaagctcaggtacgtcgaggctgggtcttcaccatggtggaccgctgttcatttagcccttattacttcgcaggtcgggtcaaaattgcaaaacacgccgttactgggaaatacgcggccattaaaatcgttcccaaaggtctcatcctgaactcccggatgtctgtttcagaagctggtgctcgtgcagacaagattcttcttggtatcgagagagagatcgtgatcatgaaattgatcgatcacccaaacgtattgaacctttacgacgtgtgggaaacaagcggggaactgtgagcttctaattatggcttctccgcgaactggaaggagcttatttatgcgacgacccaaaggtttttgatcatggaatacgtacctggaggcgagctcttcgactatcttgtcaagcgaggaagactgccagagagcgaggctctacactattttcaacagatcgttcacgctgttgattactgtcatcgtttcaatatctgtcaccgtgatctgaaaccagagaacctactgctcgacaaagacaagaatatcaaggtcgcggactttggcatggcagcgtggcaggctggagaacgcatgctggaaacttcttgcggcagcccacactacgctagtccggaaattgtggccgtaagttgggccgccgtctgacggcttctgatgattggagactgatttttattctaaacagggtaaagcataccacggttctgcatccgatatctggtcttgtgggatcattctgttcgctttgatcactggacgattacctttcgacgatgacaatattcgagtgctattgctgaaagtgaaaaccgggatcttcgagatgccgaaggaagttcaaggtcctgcgcgcgatcttctttacaggatgctggagaaggatccccagcgacgtattacggtatgtggtggttcccgctcaggcagtgccccatcacaggtcaactcagcccagtttttgcgatagatgccggagatcctggtacatccttttttcgtgtctttaccaaccaacaatgtgcctggccgtccactcgtccctccgccgagccttgacgaagtagaacgaccggttgattcggctgcggagatcgatcccgatatcatgggaaatctgaagacgctgtggcatggggctgcagatgaagacatcgtagcggctcttctatgcaaagagttcgtaccgtgaaatttttcgatttacactcaacactgattcgaggctgctatccggactgctaggaagacttgggaaaaggccatataccatctgctgatcaagtaccgaaacaagcatctcgaaaactacaatgccgaagaggaacagcctagaatgcaggcaacacgacacagagataaagcatcagatgccactgcccgagaaccgctcaaggaaaactcgcattccaagtccgcagtcaacaaaaacgtccccgttatcgaggaacattgccggccgcaagcaccgaccccaacgaaggctcaaggtgttcagcgggaggaaaatatgggtcctacagtacaagagcgtttggctaaattgaacctgcgtcctgtgccccaaggcccccgaccacctatgtcaccccgcaattccgatcgcccagctagcttgcaacctagacccacatctgctgtcaaggagtacgatcaaacccctcgcaagatctctaacgagtctccaggttcgagacgcgagagtatccaagctcccactgttgatgacagcgaagtgcaacgttttttccaagaggttgcggaacagctcaacagtttaggagctgggtcctctatcgcgtcaggttcctcccctcaaggatctccgacactagacgaggcagctcattttggggatacaagccggttcgccgatgctgaagatgatgagagtgacgttttcatgccatatactcccgcaacagagaacgatgcgttttcaatccactcttttggattgagcaacccgaactactcccatgcggcttcggaacgtgcaccaccagagatcactagacgtgccagcgtgagatcgaatggtggagcctcaagaccccgttccggcttctggaatgacacgcccgcgcccgcacaccccgagactgccagagacgccatacaaacctcgccggcggtaccaccgacaacgctgcctcgggacgcctcctacgtctatgtggaactgggagatcaacttgagacgtacgactgggcggaaagccgcagcacacgtggggcttcatctataaactctcgatggagcgaggcgacaaaatcaggtcgcaaaggtcagtttcacatacgttgggaacgaaggtaatggattgatgactacgaatgctgacacgatccttgccaccggaagctctatctgtccggcctataccatttggaggacgacagaatcatcatgaagtttccgacagcccaaagcggtcttggttccaaaacctattccattttaagccgaacgcctacacattgtggtctcacgagagcgtttcaatcaccgcgcgagtactgcaacagcagttatcggtattgtacgtcaaggttgcaacggaaacactggcggaccagactatattgcgatgcaagttctctcgtccagagagtacgtcttggagatgtatttggaatggcaacggatctcgcactcacagaatgatcccgccgcttcgtttcaatagcaactacctctgagcggtctggaagccgatcgatatatttcaaggttgaaattatgcacgcgatggcaacgtcgtcctttagaactggagctagcttcaacctggtcaaaggcgctcattcagtcttcaaaggtaagtggtggcgaatgaccctctgctgaggcgcgagaccgatcgcgctcttgctctttcagaaacgtgcgaatctgtgcgccgcaattaccgcttggataggcaggatactgtcaaatagcacttgtggcttgaatatctgccaagagtgaaagaaatcattatatttgcaatacaccaaatcgaatatcttaaatgtctcgacctctcttgctcccgatccgctaggatgctgatctcatgtaacggaaatgctacgcagtcttatgattgggaaggctcggaaaaagtaggggatacaaggggaaggcaatgaaagctacagataatcagaatgtcgaagcggttcattgcctttccgtagcggattcggctgcttggaccttttgcctcttagcatgcggcgtttgatctttcgagagttgatctgacttctttgcggaaacgcgagcggaacacagaggagtgatgtcgtttgctgagcctcgagccagaggcggcccttgtatgaactgcgcgatcatcgatggcgcctgcgtttcgtcccaagtcgagcgagatcgcaacaagggcgttggtcggttcatccttcgaggcttcgattgaacttctcgtgtgtctgtgccaaagtctagcaggccaccaaatgcagcaggcctatcatcggagcctggcgtcggggagcccatagccttcatctgctcattgcggttctgtccgcaaggtgagggcgatgtcaaagtgattccaggaggagcctcgggggttctaggtccttcactggaggggggcgacgagctactgatcggtggctgtgaccgaccgaaaagcgtcgatggggtcgtacaggtcggattgattcggtccctagtgaggtccctatttcctaccgtatacgtctgtgccttctggatagccggttcatccaacgtcaacgcagcatcgaaatcttctgcagtaaagctctttccgcgttgaagaaggctgatcggtcgaatcactttcgtcgtctctatcatcggcgtcactctcggatgactatcaaattgcgcaacactccttgcaaccctacatgagagaagggttggaggcggtcagtatgcacacttctatttccttctctcgcctgaaggttcactcacggagtggggcgctcgtcggcccccatcccagtaaacgcaagaacttcggattgcgttccgccaaaagatccattactttgacgggagagcttttgcgaaaagtcaaaagatggctcatgtgacatgttctccggcatagggctgatcggtcccgaatccatattggtgccggtgaacaacgtccgtttcttgacgtccgaacgtcccttgaatcggtcttcacgcgaatctccgagggcttcctttcgagcgacttcgtaaagcttttgtcgggtagacgtccaattgtgcttccagacaaagccggaactggaatgcgttcgccgatgcctgctcctaccgacggcatggctggcatgcgattgctgctgcagagagggcgcggatcttgaagaggtcatgccgccagaactgggcatttcagacaggtgcctgctgctgggcgaagccgagggaatgggtcgatgaaaatggatgatttgggatgtgagttcatcgagagccgatgacggcggcagagttcctggaggataaggggtcgccaagggtctcaatggattcaagaggaacttcgagcaatatacggatttggattaattcgccgtcttctcaatcgagaggtacacgcacttacactctctagcgtctctaagtctctatcgctccagcatgtgtcataagtgctacgttctggctgtgttgcagtcgtcgttgcagctacccctcttgccctcttgacagaggtcagaccgttcaaggtaccgaagcttggtatcaatccaagcgctggctgctggtcaatcgggttgatggtcgacaggctgtccgtcaagcctgcactattgagcggctgctcgatatgcgagccggagggtaggtctttggtatgcggaacgaaagggctggggtgtgaactctggctggagcttgaggacgagatttgtgcgaacgaaaacgagaacgggtttggcccgttggcgaacccgggagtgacgggagtcgccgagcgatacgacggctaggggcatgaattccgatatgagtctctttgtctaatttatattcgagtctcaagaatataagcccagcttacaatctcgtcaaaaatcagcggcgtgccgggaagaggggtcacgggagtcgtcggatcttggcggaatgcgctgcgagcgtcaaatatgatctccgtagtcctgtcgtgattgccatcctcgtcgtcaaactgctcaatcaggatgtcctttctttccgagcgttgactacagcgaagtaaggaggactcggtaagtattacggcccgtaaccacaagaccgagtagctgacaaaaacgaacgcacctagacggaagattgaggcttggtagctggggtcgtcgagcactcaaacccatggcggcgcgactggtcaagtgatccgaacggtttgcactgggctgtcactgtactgagacgtcttctctgctgctttcccggtcagcgcgaaccggatctcgaactgcgtctgtcgtcgtagttgtcccgataagacctaggctcccaagctgatataacagatctggtgtatgcgtgacgatttcgatccaaaatgactcgagcgatgcgcgagattgcgccggatatccggggtcgcggtgcgatagtgcttagcacgctagcggagagatcgagtgttatatccacactagtacactgatatcatcttggaacctagctgcttgctgcttggtactacttgcatactactacatagctaatccgacgtgatccgaaattcccaagtctatcccaacccatccatctgataccgaacgcgtcggcgatccaccgcggcagctcgacgcgtgcattcacgacccgatcaaagggggtggggcgcagggggtgaaggaagcagaaggagatcaggcaccgaaacgggtcgcgtcgatgcaacgcgcattggaagacacgtttttgcgtcttgcgcgttccagcgatgcgaacgacggaagcatcgatcttggatcttggtacatcgaatcttgttccgtcgcaatgtcccacacgagatacgacaaaagcccttgatatcatcggaatatcggaatatcgaagcatgatcgaggtatacatgagggaagccacgctgctgggccagcgtgggcagctggcagctcgatcgaccgaaagactcctcactcctgtttcgattcggccaactttcgtagccggcgattctctcccttgccttcccgccatcggcgattttgctcttcaaccagatcacctcgcggtcgattcaggaatggaacatacttgcgcccggcttgcatttcgccccccccaagcgtataactcgtcgcaggcgcgtccgcgatattttgctgttccctgcttaggccttctggtctatgtattgcgacggcttcctgatagaacgcctcaatctgacgggctttaatccgagcttcttcggcttgcgttttcagtgcattgagcacggtgagatggccctccccagcctcagctctcgcttctgatcgcggactcgcagcctccacgggcccgtcgtatccgccgtacctccagtctacggcgcccacttcatagccacatcgatagagttgcaggggtagcgcagctcccatcacgtagaggggtttagatgcaacaggcgcttgatcactgctcatcgtgccagctgtaagcgtcccgtcactttttctgatggtatcaatctctccaccgggaggttgataaccggtatgcaagagccgcgagacgatctccggtgtttcaaacccatgtccgacgtggaagagaacggacatgatgtgtcgtacctggtgccaaaggaaggctgagccgaccaactcgaacacataagcatcttccgtgtctgcgtgagccaaaggcgtgctctcgtaagcagagagattgcggttgtcgtcgggcctcacaacagctttaagcacgcgacgacgatggttctctatttgtttactaccgtccactttgcaaaagttgcggaagtcgtgttccccaaccagtcttgtcgcagcagcttgcataaggtctatatctagaggggggtgatccggaatcggccgtcgggtaaaaaagtaccgataatgccgagtgacacaagagaatctcgcatcgaattgatcggccagcgcttcgtcgctctttggctgatcttgaggcaaaggggaccaagcgaggacgcggatctctggaggcagcacgcggttcaagatgtgaggatatgaatattcgctcgcaccttgagcggagggtaccgcttggggcgaattcttcctcttcatggctttgagttgttgtcggaggggcatcttcgcgagcgcttccggcgtcatctctggaggtgtatagtctccagagatacgcatagcgattctttcttgcgcagtggctgtgggggaggttgttccgacttcactgcacccggcggtggcagtagcgctgacacgatttgcctgagcatctctaggtggttgccagtccccacctacgtggagcggaaaccctccgtctcccgggtgtcttttgcttttgatgcgcaaagatacgacttggccagcgctactgactccgcggtccgtgcgaccgcatcgggagaattcgcaaccttcccaaccgaggcccgcttcaatcaagtgcgtcttctctaaggctttgagcaattcaccttcgacagttggaagaggggtaggcatttgttgaatagccaagcccgaataatgccacccttgatagacgaaaagtaaggcgatgtgccgagtaggatgtcggtggaaagacgagcttttgctcgactccgtcacaacctgctttccttcaactttcgcctggtcgggtgtttcgacgttgcgaggagtatggtagagtgcgggctcggcgatgagagcgtccccttgagatttcagctggggcgacgatccagaggggttcttgtgagccccaacaacggccttctcccgttcggagaaagaggcagcctcacctgagccgtggttaccggatgacaaggtgcgaatctgttgcccgactccccgtccagcgctctccggcctgttcggtcggtctggccagactcctaccaacttgcatccagtctccttcgcgaagccttcgggaccgctctcaacccagaccttctctaatctttcagcttgtctcctagcttgctcaatcaagtccacttctaagtcattgagctcgtgcgaaggcacttcgtaggtcatcaaatcgcgggctgttactgcgcggcgaacagtcctcgagaatcccgctccatcgacgcccatccattcggctgtaatttgggactcgatatttgacattgtgatcctcttcgtgatttctccaggtggtaggggaggagagggtctaccaggcgggagaggatacgcgggcatagtcagggaaggaaacgggatatcttgcgcatatttggcgcttgggaacctgagaaggtgcatagtcagcctcgtcacgccaaacgcacgctcagcgcaaccagaacgtacatcgccgagaagtggttgacggctaatcgtacagctgagacactcttagcaaatgctccggccatctgagcatcagagtgtccacggctcttggctttggcctgaatcttctgttgtgcctcataggcttcttctttcgcctgggccccaccaaccatgtcctgcaggctttgagatgcaggtggctttgcgatgcgaggatcgacccatgcattggtacattcgtgaaccaacagactcgggctgtcggccatgtcaagaaaggcgttgttctcagtcccagcgcagtcacccattacaaccactttgcgcgaccggatggtcgaagctaagggcggattaagaatctgtccgtccggcaacgtgaaaggcttcaaagttgttgacagagcggtagtcacctgccgaggatgccgcagtcgcggatttgactgggtgatcttctccatttgtctgctgattataggcagcagaagttcgagattcagagcctccatgactggcggctcagtgatgacatatccgacgctcatgactgaggcgcaacaaattcagccgaggcgtgcgcagctagactatttctttctcacctcggtgccgaataggcccagcgtccacccgccagatattgctactcgcagatgaggagacggacagacgctcgacgccctcttggctttcgtgcgtcacgtcactggcaggtcccgctgactcggccttattgatgatatctcgccaacagccgtcgtcgtcggcctcaatgttttggccaatcgcttctgcctcttgtagatcttcaatattgcaaggacatgaaggaccattgcctccttccgtgggtgaagtgcttgcgaggatcccgtcggccaacgtagcttgattcggaattagttcgtgcaccgcgtaagagtcaccgagtttcaaggcagtgagatttaatatttggcgaatcataagcctcaatcccggcggcccgtaaatatggatcttggcccgcttttggaggcctagtgactgcaaagctgatcgactttcgggacttgtctgtataccgctgatcagggaacccaacaatggcgcaagtcccatcgtgtgatcggcatgcatgtgagtgacgaagatccgttcaattcgagatgttttccactgggaccgttgtatttgcagttgagttccttctgcgcaatcaaaaactgcgcattcatagatcttcagcgagctcattctagcatcatttgcaggaacagccagcttacgccaagatgatttctcaagattcagaagcagagaggagcagttcctggaaggtatgggtcctcccccttgaaaggtacggggcattcagtgagtttgaccatcagggcacgaacatggtcagtagatcgtcttaccgctgctcgttccgagctgtcgaccgtttcgaatcgatcagcaggttgacatcatcgaagttggtgtgtacatatcgtttccacgacttacgaaggtcacactcaagggcggtctcttcgtcgtagtaacggggacctccttctttgtctgtgatgaacccgatcgatctccctgcttgacatcgtttcgccgagcagctgaggtagctgagtttccttcggcgcccatggtgaagaatcctcgtactagtttcagcgatcgacccaccgcaaccgatattattgttgagtcgggtctcagtgtgactatccttccttccttagcaggtgaatagatctggcagaatgacccaaggatatggaagaattatggatatctgttgtagcggctgggagaccgttcctacgtacttatgtacatatgttcatatccacccatcactcctgacattcaggttaggtctaacgttgaaaggaaggctctccaggcgatcgcgcttgattccgcgcgctttcggtcatctacgagattacaactaaagtagcagcgtcagtcagagtagagtaaccgtagtaagctcgagagttccaaccgctacctagccatccgtatcgacctgatatgaagcaaccgaccggtctttcgtcaatcagcatagacggctcgcagtgagatggccattgcgagaacatcgccaccttcgtcccccccggaaagcctctctcagctcgcatagaagggatgccaatccctgcatgagaatatctcttttctgaaaccgatcgatttcgaaacgcctgatctgggccaagcatagacggctctgatcattacgctgagcgaaggatgatcattcggtactattaagcccccccagctactacattctgccttcgtcccgcgccatgtcaattcaaaagggcctagaccaacctggggctgagaggtcgggacctttgcataccttccagttgacacttccacaaccccctcaatatgatttcaccaacgtacccgtgtcccacggattccggactggagtcgataatcccgctgttgaggcaaaatcgcgaccggacttccatcggtccgcaaaatggtgatctcaaccgagctgatatggcaccgtggattgtcgggctgaaactatgctgtcgttcgataggtgcccagacggtacggccgccctagcgataactgaatcgaggaaatgtcgggtattcgcgaagtacgtcagagactgcaagccccatttcagattgttacctgacgagtcacccgctagagaatctcttccacagtcggacccgccgcttcaagcagctgtatggcccatggtgcaagaatcggctcaaccttcagctatctggtcgagcatgtggtatccatatgccagcttggcgaatccagcgacattttgctatgttctgggtgtggccaatggaccagtacgattggtcgatggaaataccggccaggtgggaaaagcagtcgcaggcctcttcgttatcatttttctgaactagatattgcaggtcagggcttcgtatgcgatcattgatcatagcgaacgcttcgtcgcgccatcttctctttgctttaatggcgatgcatccaggcaagcctccctggacatgcgctgcacaatggcgggttccgtcgctaaaggttctccccctgcttaggctgtattgcggattcgagtcggcgatcgagatattcgatttcaatcgtccggggtcagaaggtgtccggatgagaaccacaccaagcagaaaaagtcgcgacgggcagaagggtaatcgtctcacattcctgaaaacgcgcaacggtcacatctgatcgatttcacatcaggagtcatttccgccttgtccttttcacctgacggatcgggtacatttgctgctggctcttactctggcaccatcggaatctacagcgaggaatcaggcgaagatcgcctcgcggaagtttacctcggcgaagctagctccggtgtgactcaggtgagatgctgcttgttgatgtccataggctttcgagatcttgaccatgactccattcgtagctttcatatcatccctccaatccgcatattctctatgcggcatcgaggatgtcagaccatatagctggatacgatatgcgaaatctaaatgccgggccattcgtccggctgcatcgtcctggtcggacccagcagcgattgtccttcgatatcgactgggccggtagatatctggcaaccggcggcaccgtaagttattcgtgaattttcgattactgctcgacctgatctctcatcgattaccaggatggtatactacgaatatatgatatcggatcccctacatctgaagagctttggcattcgcagttgcaaccaggtcagttaagatgtgctatgattggggaatgagtcgccttttgatactttgagcgcttttgtagacattatcgggtctgtctctatgcaccccttcgagccgacattactcgcggcctgcggttctcgtcgaggcttgagtcgggctgaggtcgcctctgccgaccgcgatctttccgtggatagcgataccgaggatagctcgaccgggtatgctagtgacagtactgcgtcaggcagtctgctatggaggcaagacgaccccgcaccccatctagggctaacgctaacggatctaagcggggtgaagccatctgctgaggcggtccaaaccccccaagttctcgaaagtgaatcataaccgcatgttagccttgtagagagacctgcacaaacagattgtccatggtcgtgcttctatcacaggtctcgacgcatatgggcttctttcaacatgatgcagcgcgtttcgattctttgtgtgccatgccgaagcgcgaaaatcgcggcgcgcgcctgatggacgagtgagatttcttcagacccgagggctatcgacatgcagcatgtagacagaaaatcgagggccaccagagaaccgtcggatacgtacgaatcgcatcgtggtcagctcacaaccacatagcttgcaatcatgtcgggaaatctcacgcacattctcttcgagaatgcttctggctactcgctcttcgaggtcaacatccaggaggaggttgcagccaagagcaaggccgtacaggaggctgttctggacttctccaagttcagtcgcatggtcaagctcaagagcttcttgcccttcacatcggccgcagaagctttggcaaacgccaacgatgtttctgaaggtacgctcgtcttgagaacaacgagaacgatcggatcatactgacacgggaaccggaaatgccaggaatcgtctcggagcagctttcctccttgctgcaattgctcatcccttcgtcttccaagtcttccccccgtgtattgcttggaatcggagagaggacgcttgcatcctctatcagtcagcaacttaagattccctgtgatactggcgagaggacactggagcttgttcgaggtgtcaggttgcacgccgagctattcctaagcaaagctggcacaggtatgaccaagggagatgtcaagatggcgcagctcggtttgggacacagctattcgcgaggaaaagtcaaggtaagcgaatgcagatatggtaggagacgtctccatctagaattctcgttgaaggtcgctctcctttcttcttttagttcaacgtcaaccggtctgacaatatgatcatccaagccatcgcgcttgccgatcagcttgacaaagatgtcaacaccttctccatgaggatccgcgaatggtattcttggcacttcccagaattggtcaagatcactccatctacgcctggccagtacgctcgccttgtcctgctgatcggagacaagtcccagttggacttcagcgaggctggccagaccgaatggattgccaagattcaagagattctcgacgacgacgagaccaaggctaagaacgtaatggacgctgccaagagttcgatgggttccgacatcaacgagatggatctcctaaatatcaagcgcttcgctgagcgtgtcgtacagctctcggattacagggccaacttgcgacagtacctaatcgacaagatgcacgccgtggcccccaacctcagcgccctcattggagagactatcggggcgcgattgatcagccatgcgtaagttcatcagctcgtatcacagtgaacggccgattgagcgccaatttttacagcggttcgctcaccaatttggcgaaataccccgcctcaacggtccaaatcctgggagctgaaaaggctttgttccgagcactcaagaccaagggtaacacgcctaaatacggtctgatttaccacaggtgagtcattcgggtccgcgatatcgaaatgcgccacgtgctaatgattgtcgcctgatgcagcacgttcattggtcgagctggcaccaaacacaagggccgaatttcgcggttcctcgccaacaagtgttccattgcttgcaggatcgattgcttctctggttggtacacatgtcgcctacgcctgactgttcatgaatactgatcctgcgaatcatccgaactgctcagacaaccctaccaacaagtacggcgaagctctaagagctcaggtagaagagcgtcttgccttctatgaggtcagtgcagctcaatcatagtagctttggcctcgtaactcatgttggtgcttgcgacagtctggtaccgccgtgagcaagaacgccgatgccatcaagaaagcccaagccgcgatcgcccttgatttggaaggcgatgatgacgaggatgacgacgagaacgccaaggaggatgaagtagccgaggtgtgtctggtccgaaagccgctacaaaactcagtgcttagactaattcctttcctaacaggccatcaagcttgtagaagagggaaagaaatcggctgctgagacgaacgccgggcagccttctgaccctgaactgcaaaagctggcttcgctgatccctggggtcagtgctgctgttggaagcactcccagtaagaaggacaagagcaagaagaggtcagtcaggccattaaaaggaaatctattcacgtgctgatggacaaaacaaacaggaaatcggatgtcgctgcgctctcagcagatgcgatggacgtggatgttcctggtgatctttctgctgtcggcgttgatagcaagtcctcgaagaagtccaagaaggagaagaagagcaaatctgctggagatgtttccatggccggcgatgtgagcatggttggcaacgatacagcagccagcactagcaaaaaggagaagaaggaaaagaaggacaagaaggacaagaaaaagaaggacgcatagcgttttctcggaacagatcttgctttctccgtctctttagtcttgttgcctagtatatcgtgttgtccaggctccagcttcgttctcagtgacaccttgtaactgtacgcgattatcttctgaatcatccacgtttcggggcggccagtcaatgccaatttccagacagtctaaggtaaggagggtatcttggatacatgtcgtcaattatcgttacggcaatggccgatgagtcgtctcaagagactgaggcgaatcacagcacaacgcacttgcgtttgcggttcgtttgccctggtccggctgccttccaggcctccttcagggcccctttgccgagcgcttctcgcaaggcagcatcaaaaacctcgtcgaccccaatcctcaactttgcggaacactcaaggtaccgtttcgcgccgatttcacgggcgacctgctcgccctctgcaggttggataggtcgttgaccttgcgaggccatcagtttcacttcacggtcctcttcacgcaagtctgacttcgtgccgatcagaaggatcggcaccgtttccatgaagtgagacacttccgggaaccactgccggagaaggagacagtttaaccagggtatcacagagctagtaccaccgaaccccgtcttcgcttaccttgtcctgcacgttagccaagctcacgcgatgattgatcgcgaatacgatgatgactacatgcgtgtcgtggtaactgagcgggcgaaggcgatcaaagtcctcttgtccagccgtgtcccacaaagtcaggctgaccaacttgcccgactccgatgggtggtttactatcttgactgaagtctcgaacacggttggaacgtagtcctatgatcgacagcggtgttcacggtcagaactacggcgcctgacccactccaatcaatcaagcttccaccagcttacttccggaaatctgccttcggaatataccgtgagaaggcaagttttacctgccagacaaacattcggtctgaatacgagtagcaggatggcggcaagcaaaatatgcacttaccgcatccaccatctccgacagtcacaagtttcctctccttttccggtctttttgtagccatcacagtgccgcgaaggttcagggacgacagcgcaagggcgacttttggtgcagtcgtgaatggacgaagggtggccagatagagagtcggcagactagtgtcttatcgtggcctgctacgacccgaacaggatgctcctcgattcggttgatgtgttgagagtgagtcttggttgagctgcgaatcgtcaaaggcccctgaacacggcaatacactgctgactggcctgatggtatgaggtcgggtcgggtcagatcagatcataaaagatcatcatcatgcatcatatcgcctatcggtcataccagcctgttgtcaatgggaagatgcgtgtgattgatgtgaatgatggaccgatcgtttcccaacaagccctgtttgtttacatttcctgccgttcgtgcgagaacacggcgagtcggttcacctagagtctcagctttccccgcggacacgacgaagtgaggcttccggaaacgacggaataaccggacgggacgtggtattcccctctccaacatgcagccagcgtgttggctatagacgcaagtcgagtggtcagttgccattattcgccaactctgggtcgaaaatcaagggctaaagttgacatacacacaccttactctccgttgctgcccatcacccggggaaaaatcgttcgaccctaacctcgtttacctttctcgacgagtggagtctccgcctttttttcccaaaccccaaatatccttcgcacgcgctttgcctccatcgtaccactcctgaccacccaccccaccattaccaaccagcaaccgactcgcttttcgcaaagggtacatcagcacatcagcaatcaccactgtagcagaaactcgccatgcttgctagaaacagcttgacctcgacccttcaatcgttctccagctcaatccgtatcctcaacacacaaactagaaaaatggtgagctccagcatgatgaagtcgacaagatcctgctaaagaacctgccgctgatcatgccaattcttggttagtccggtgccgtcgctcagcaacctcctgtctatatcgtagctgcgtccaggacgcctattggatccttcaacgggtccctttcctcgttgcccgcgacccaattgggatctacggtcgtcaagcatgcgcttgccaagatcgaccttgaccccaagcacgttgatgaggtcttctttggtcaggtcatccaggctggaactggccagagtcccgcgagacaggtctctatcggagctgggtgagtgcgcggacagaggcaaccatagcctctcggacgcacgcattgccagcggtcgaaactgatatataaaaaattcgggcttcaatcccatagtattcccaataccacggatgccaccaccatcaacaaagtctgcgcctcaggaatgaaatctatcatgttggctgcgcaatctctcgcccttggaaccaactcgtgcatggtcgccggtggtatggagagcatgagccaggctccgtgagtctgtcgctgttcctcgcaatggggttgccacagaaactcacggcaagagggctcccccatagctttttgactccccgtcatcctccctctttcggccacatgacttcctctgactctctcgttatcgacgggctgtttgatgtttacaacaagtgtgccatgggaaactgtgctgaacacaccgccgcaaaatatgacatctcccgagagtcacaggacgaccacgccattgaatcctacaagcgggtggagaaggcttgggcagagggcaagttcgaggccgagatcgcaccagtcactatcaagggcaagaagggcgataccgttgtcaaggaggacgaggagtacaagaaggttttctacgacaaagttcgagggcttcgacctgtgttccaaaaggatggcagtgtcaccgcagcaaacgcttccaccttgaacgacggtgccagcgctgtcattctgatgaccgaagagaagctgaaggagactggcgtcaagccattggccaagatcctaggtgagcatctctcgctttcatactgtgcgatcatttctgattcacctagtacgtcgatactagcctatgccgatgccgccgccgatcctatggacttccccaccgcaccaaccatcgccattcctaaggctctcaagcaggccggtgtcgcacaggaggacgtcgcgctatttgagctgaacgaagccttcagcgttgtcgtacgagccgcggagaagatcatgaacgtcgatcccgccaagattaacatcaacggtggcgccgtcgctctcggtcacgtgagtagcgtgttcctcttagaggcctttttcgcaggctgagattttgcatatacgctatgcagcctatcggatcctctggatgcaggatcgtcgtcacgctcgttcacgccctgaagcaaggcgagattggtgttgctggtgtttgcaacggtgtaagcgtgactttccggttggagtggcttgaacgcttttttgaccaaattgtttctgctctgctgtcagggaggtgctgcttccgccatggtcattcagcgcttgtgaagcaaagatatctcggtcgtttgatatatcgctccgcatgcaccaatataaagtcaataaacagcaagacgtgcgtgtcgcttattacagcaaagtcagctttgcggtcattcggcgatcgtggacaagtgtgattcatccaagttctttgtaatgactggtactgtggactcgcgaacaatggcgacgcgattcctgtcaaccacacaaagatgatcgccatccggtgaccaccggatatcatgtgtctcgaacgattctgaccatacgtaatacgcaaacatcagccaatgccaagaggaaacggagtcgagccttcctcacccatcgggacggctatgaccgcagcggaacccgaaattgaggtactcgaacttgacgcatcgagtcgttcctcttcccaatctccatcccacaggaagacccctgaaccggtgccacggatatgctcttcagttgctagagtaacagccgcgacacactgcagccgagcggggttccactgcacctgtttgacaggctcactcaaacgcagtatcgtttgtacgccgatgacatcgggagcagcagcactgggatgaggcaggaaaccgacgatgtacacatcgttggccgcagcatctatgccgccctttgataagccatgtaatatgtttgccatatcaaggtgttgctttctagcacatacctgaacgaaggagtatggaggtcccatccgcgttccactcaagctgcgaaataccataggggttggtagctcgacctgatttattgtgcacagggttccagctaacttgccccgcgttgcgagagactgtagattcgtttcaatcgcttgtattgctttcgatgaagcctgaataagactcacgtgatatgggtccttgttgcgaagcgttggaataccagtcgtacggttcggtccacaccgtctaggttggcacgtcaatccactttgccaccgacacacaccgccaggagatgctcactgcactgtcccggggattttgccgagcggggtccagggtacacatacatctccatccatcggcttcgataatgcgcacctgcccagtgggaacgggtgagcctttatctctagattgcccggtctgatgtggaagcggtatttccacccaccttgccgtcgtaacctccaactccaagccagttgccccctggtccccagttgacgactttgactcccagtcctggatctggaccaacgaatgatggcgatccagcagtaaatgtactcaaacgtggaccgagaggggaatacacatgcaaggagtactatgtggccttatatttgtgagtgaaaacgttgatactgacctcgttttctggactcacatccagacgatgatcccatacggctatccaacgaccacaaggtgaccacgagacgccctgaacgtcggtcgttgaaataggaaagctctacgcagaaggtgacattagcaactaattgtcaggtcgagcagccttgccaggcagcgtactcggactaaattataccggtcgccggcatcgtaaactgcgagggattctctagctttgtgcttctcagcgacgacaaagtaccgacgatcttgccggtaagaatggcctgcagagggatggggaataagcgatccgacgggattttcgaccaaaacatcaactcacagccggaaggcgacttgaagctttcgatataagccgttggagcgccggcgatgttgtagaccgaaaggcggagctatgatcgtcatgaaggacagtaggtattgtgacaaacgggcttgtcaacaaagctttccttacacgttgttcggagaagcacaatatcgcggtgctgtcaggactccattccgacctggctaagccttcaattccggcctgtacaaccgctcgaggatgttctgtcgagtcggttagtccaaagacccacgtagttcccgttcggggcgcagaagccatgatataactagaatctggagaccacacgagctgcctgatctcgggttttgcgttatggtcaacagtccaatgtggtgtacggcaagcccaggttcgaaccagttgcatggtatccgtgactcgtacgatgacatggtcttcaaccgctacagcgaagaaggtcgtgccaggtgaaaattgacaggatgatggcgacgtgtgtcggtagacatcagtgaaggtgtattgagaagattccatcgtgtgcggtggagagctggccgaggtattgtttcttgcaacgaggtggtttggtcgttacaaactccccttatggtctgcgcgtggcaagacgtattcaaaatgttagagtttagtgtgaaatgtacaacgttcaagagcaaacgtgggtttcctgatgggctgactatctgatgtcgagactatcccttatgaagctgtaatctgactatagggatcaggaaagtaaggagactatcgattgtttatgttgtgagagcataaccgcgagctttgtcaagaggatccgaccggaagcaactattttgaccatctattattgtcgtttttacacgtcatagagactgatacgtgtgttttagcgattataatgatatcatgccttgtttgaccccttcccccccctcctctttgaccgaccaaacatgttctgacgatatgacaggctcttccaggtacctggcgaatcaacgagaccaccgcagctcgacaaacaacactgccagatcatcctcgtttcaaaatgtcacttctagccaacgttcttggtttcagcgccttcggatttgcgacccggtgcttccaactcggcatccagaagaagcacatgttcgaaggtgcgcatcgttcggaacgacagacctggggcatcttaatgagggactcgatgctaactcgaggtataaatcgacagctcctcaaacgcacctgatcgctatggccgctttcggggctctcggctggggagtctacgaaatggagggacgacagtaagtccacccatttaatcggccccgccaaccacaagatcaacggcttgctgagatcccgttgccttgtacctgaatttaacagaaagatcatgatcgaccaacgacggactatgctgcttgaggctaggcgcaaagagaacgaagaatacgagcgccagaaggccgcgggagctgatggtcactcgacttgaaccgagatggggtcttccgggtagtcgtgggccagtcgctggtgttgtatattacggctactggatagtagacatggcactaaagaatcgtcgtagaaatctaagtctctcaaagctgctgagtaaccatgggcagcttgcaggatcgccaatatttcgaccgatgatatcgaccgttgcagaaactccccaaaatggtttattttattacaagggcaacaggtgtctctacgatcacacggcccgagggtcatcgattcgtcgagcaagcgattacaccagcatctctataatcagtcctccggttcgagatcgccgtacggtcgagcccggaaatatgattcgtcaaactgttatatggagaagttcatggtattggtcaggtacagaccttgaagtcctcctcaagttggtcaagactcacccagtgcaccctgacgtaaccatcctctccacctgaagcgaaggccttgccagacgggtgaacagcgatggtgttgatcggaccgctacatgaatgccgcccgaaggtgttagcgtgtctgtgtgaaaacggccttcgtaccactacgggactcacaaatgtcccctcacgcgtccgacctcctcctcgaatactcggtggtaaaatcgggtctcgaactttccgcttcgagctgacgtcgttgtaacgcttcgtgcatcctgaccaccaccgacgatgacatagggcttgacaggagtgatacaggcactgttcaggggagtctcggacgagaacgtcttgatgacctggaggttcttcgaatcatggagctgtttgccgaatccgaggagggattagtaccttcaaactgcaccctctttgctcgtcctcacctttgcagtttgatccttgctcgacgtgacaaagtaagtgccatcgggagacaactgcagatcagtcacctgacccaggtgggccttttcattgatctcgatctcttccccagtttcggcatcgaaaagggcgacctttccgctctcatgtccagtaatgatctctcgtccgaggggggcgaaagcagcaaccgttgctttactcccaatgggtgagaaattgacaagaggttccgtgtcctctgtatattaccgagggaatcacatgggcaaaagaagaacccgaaacatcgtcagcatctggcgcgctgcgaactgtggtgaatggtttgagaaacgcacggttggagcagtctccctcgcggttgatgccaaagacacggatggctccttgatgacccgatcgttgttcggtcaagcacagaatccttttgtcatcgtcactccaagcgacccgcttgatggcggtagggaattcccacatctgcaagcactttccgctggcaatgtcccaaagtcgcatctggttgtctgcggacccggagaccaagagcttggtttgggctgtcatacagatggaaaggttgtaagccggtcatattcgctaacaggcttgtctgcgaaaggggttttgcaggccgtgtaacgcacagtcgcatgcgatactccagatggtaccgttgtgaccgttgtatgttccgagcctctctccgttcgaagagaaccaggcgttgatgacatggtccttcgaggcggtaaacaaaaggtcaccctccttgttgtacacgatctgggtgagcgaacgctcgtgtcctgtgatttgacgtttgaggatcagttgtctagagcatgaggagggagtttgtgtcgagaatttgtttcgtaccttgcaggaggataggtttcttcgaaccccaaggttgttattagctcggccagtgctcgacacgctccgctagatcgagactgaccattttgtcaagctattttcttcttcttttttcgatgcttatgggtttcctctgatagagatagtcagctatctttgattgaggattttgagacgcgttgacgttgttgaggttgctgtcagcgatcacacaagatgcgcagaatataatgcaatatcgactctgccgccttgggacctgaacaaggtcgagagcgtctcttcagaagtaaattcggtgaagctttgataatttccctggtttcaacactaaacggttcaaaaagggaaggaccggaagcgaaaataaaagtaccacccgagccccttctcaccgcaccctctttttcatctgttcgcgcagtcacgtgatttgttcccaaaaatcaaaagtcttcgctcggttgcgtaactctaacggtcccgcccggagacacgcggcgttgctaaccgcccttcccaggcgagccaggaggcgagagggggaactgagcgccacacggtcatgttcgcctcgtcgacgactcaccgtcaccgatgcccgatcgatcgatctttatatcctttggactagtcctagagcccacaaattacaaaactgcagctatgcagagggtcaagagtcgccagcgattccagtggatacctcgcttcgcccttcttacgccgtgggctactggtcgctcgcttgctttaccgagacctgcaagagcactctcaactagctgatcgtacataaaggaaggattccctttgtattgtcgtttgatctagtttgcatcgtccccgccactcttctaattattttgcaagaaaccatagaaacaagttcgctcgctcatcgattgccgtcactgtctatcatccctctatccggtcaccagtacatcctctttccttcgtccctctcaaaatgaaggtcgccatcgctcaaatgacttccaaggccgatcccgagggcaacttcgaggtctgccagcaaatggctcgtaaagctgccaagaacggtgccgaaatggtgttttggcccgagagcaccgacatcatctttgacggagactaccccaaagaagacgagcgcaaacattacgaaaactcgcgactgaaaaagtttgtcgacaacatgtcggagttggccaaagaggtaagctcttccactccgggcatgatctactcgatccgacagctcatcaggctacatccatctccagacgagtctctacctgtctttcggtgctcacaccccttcgcgagaagaggcagaaaagtggtacatgtcgtatctcacgatggatccccaggggaaactgatccacaattacaacaagatccatccttgtgtcatcaagcgtcccgacttggacgtcaccgagacggatgcctgcacttcaggatcccctggcaacgataatatcaaattgatcgatgtcacctcgcgatcgggagagacattcaagctcggatttgccatctgctacgatttacgataccccaagttctggctcgagctacgagatcgagacgcggacgcggtcatcgttcccgcatgctggttcttccccacccgagcacattgggagaccctgctcactgcccgtgccatcgacaatcagtactacatcgtctgtccggcccagatcggagtccacaacgaggagcgaccccccagcttcggattcagcatgattctcgatcctgccggcgaaaaagaggtcgccctcggtcgggccgtggaggagaatggcaagctggacatgtctattcacaaagatttccaagactcgatcgacgagttccccgcaatcgccgagggtaccagcctcggatacgccgacatcctgttgaagagggtccaacaggtacgaaaggaactacccattcgcgactatgagaatgacgcctatggtgacaagcgtgacgactagaagagatgtagtgcacgagagcaggagtcccggcggcttcgatttggcagcggtagcattcacgggcgagcaacgatagccccgaaacgttcattgtataaataacgatcgtcgagcatggcgggcacgtataatcatcatgcatcatgatcatgatcatgatatcacgaaaggacgtttcttgtagtgtcgagcgatattgtgggcgttgtgaggctgactaatccgacgatttcgcctcgcccgcgcgagctgaacttgttcacaaaggaggatcaaggaggagtccccgtaaccctgtagccgtaacgtactagactagctaggctagagtatggtatatagtcatatagtcaatagctcagtcacgacatcaactggtgtgccatatatctacaaatcggctcgagcttgccacccatctcaacgaccgtctcaaatcgatagacgatctagcatcttcccgccatcgccacgactttgagcggaataggcactcctgaaccagagatcaagcaatcacaggtatttgccatcgtgatccaccggtagccagccaaagggtcaccggtagctgcgattcagatcgttgtacaaagtctcgccttcatacttatcgcagtactggtcgggatcacccataggaccggctttttcaacattcgtacattatcgacttggtgagttgttcatcatggcattgcctcaacatgaggagaactgttttgagctgacttattcgggaccactcgactcaggttcttgtaaacgagaggcttcgtcgatcagcttattggcaacacaaacatgatccgagagcaagatgatggctttgtttcgcctcgtccatccgatcccacaggaacacccagtcgcgaacgaccggaacagtccacggaagtcagcatgccgttaaccccatcacacaggttggacttcaatacccctgcctggaatagtggccaaggagaattgcgtggtccgaccgcagaagtgttagaaagcgttcgtcctagcgaagggccatctcacatgccaatcaacccgactttgaaccaggcgagcgccgagcagcccgatgtcgccacggatcctacccgtgcggctcagccacctatggagctacctgttggccttcaaacactgttcatgagcatgatggctgccatgggtacggttgggcctgggcctaggcctttttcaacttcgcctggatcatactcgcctgcaggtcctagaggctcgtcgataccgcttcctaccacatcaaacgatagagatgataccatgcccgctggagcagcatcagacggttcgcccgagcggccggaccctcgagcgttctttcgccagcagttcgctcaattcgccgaagcgttgcgccaatctcccgcttctcgatcggatccggaaagagcgcaagaactgttgcgaggtctgaaggatcccggccagacggtcttgcgtaggctggtacgcatttgcgaggtggaagacgctcgaggagagtccaacgaaggtgtgcagtgcggaatttgcctagacacaatcacggagatctttgaaaggatgcaagacgcgaaagaagcttgcaaatcagatgggattaagtctcacatgaatgatgaaacacctcgcgagagaagaaacatggaggtcgacgcgcctctgcctgtcgctatggtcacggatacgcctgatatgcaagacgtcgagctgttactcgatgggcagagatcggcgtgcaactcagaggacaccaatttcaaagccttcccttgccaccatttcttttgtgaagagtgagctgagctatcgtgcgatccagcatgcaaagattgaaaaactgatcagaacactatagatgcttgttgccatggcttagcactcacacaacatggtgagcactttcgtacagtttcacctcattccgaggtttcagctgaccgtcaaatacaacatagtccgacctgtcgtctagatattgatcctcactctatcacgcttcgccgaccggtctctcgtcaacaacgtgacacctctttgcggcctgggccgacccggacctcagcgatccggagcacccgtccagctgcttggagaatgctccgtgtctcgccctctgccccgccgatccccgtacaggcttcgactccatcatcgaacccagatagactatcagttgcaacaaccccaaggcatacgccagcctccgccgaccaagcctcgcacgctacacctacagaacaccttccagttgaagacacgaccgtggaatccacaggtccaccccgtttgcacgcttcgagggggatcgagcagctcagagctacacccgattcaccggtcttgcctcgtcctctgattcctactcatggacatcatgttatggacggcctgacgatagtgtttttgtcgggtgaaagtgtcccgccttctgaccgcctgtccggaccgccgccactcaccgagggagaaagtgccagacaccactcctcatccgaggcaaaccctgatcgaccagcacaaccccttgcaggatccgttgtctctgatatcggatctggcccgccccctccggcgcatcctggccatgcgtctgagcaaccggccggctcaccgttatccacaaactcgaatccgggcccacaggcagaccctcagcccgggtcagcacagcctagattgccgcccctcattctcgcctttggacaaaacatggcagctggcttgaaccccttcgcagcgccagaggacctcgtctatgtccgcagcgatgccgcatggagtccgccagcgccgaaaaattcgttgcgacaatggcttcacaagcgcgagcgtgatctcaatattgtctgcgatgacccacattgcagatacgtccgaccggacgtcatcaacgattttgacgaggagctagtccaattgaacgcattcttgacctatgacgcactatgcgaacatcggtatcatgcgtcgtgtcttcgagatgccagctgcgccagcggcaactaccaacctcttggcgaccagggctcacgagcggcattgcgttgcctacaatgtagaaagcaaggttgggcaacgatggacgcagctggacaaaggtctcgttcgacgtctatcgcttcgggccaacagtgagcgagggcagatgtccttacgccatattttaacgatccatatatcctcttgccatattacacgatattccacctttcacacactgtatcaaaatatatccagcatcaatctcgtgccatactgcactgttgtaatataattagcgacactcaagcggcatcgattgttgagaagcatgtgtgtcattgcgatcctgtcatgtggcctatgatcaggttcggccctgaacctgattaaccgacacacccgatatccgcccgcaagatcggcacgcgaagaggatcaggtctgacatggctcgcgcaatctcgtacgaatcttgccgctcgctcactctcatagagcaaagcaataatagaggtgctccgatcgatgctcgaatgatagacacatcagcacttgttcagcgcagaattagactcagacttgaaccatctctgattgtagtgataggcgacactctcaaacattgccgcaacatgatcccttcaagagtcaacttgatcaatgtccttgttcccgtcaagagggcgatcgattatgccgtgaaaatcaggatcgccaaggatggtaagggtgtcgatacgacggttaaacactcgatggtgagtgcttgtatgggttaagatcaagactgctcaacgactaacggcgtgtctgtgtcttgatgtgaactctatggtagaaccctttcgatgagatcggtatgtcgtagctggtctcacccgacccgacctgcactcaaccatagcgttccctccttcttcagctgtcgaggaagccattcggctgaaggaaaggaccaaggccgtcacttctatcactgccttgtcgatcgggccggccaagagcgtcgaaactttgcgtaccgcccttgcgatgggagccgattcggcaattcacattgtcacccccgaggcgccctcaccgtcatctaaccctgaacccattaatgtggcggctgctatcaaggccgttattgagcgctccaagaaggccgggtcggacaaggctatcgatctcgtcatcatggggaaacaggccatcgatgacgactcgggtagcacaggtggaatgcttgcaggcatgttaggctggggccaaggaacgtttgccagcaagctcgatgtcgacaaggcgtccggcaaagttgaagtcacccgggagattgatggcggtctctcgcgcatcgagagccaactaccgatcgtcgttacgaccgatctccggtacgtcgacctttcaggctgtactgattgatgagtcgcggctgatttcgatgagactgcgttctgtgcgtactatagcttgaacggtgagtgtggcccagatgacccgactatataacaccattgatcgattttatcttctcggcttcagagcctcgttacgcctcgttggtcagtatcaccgatcacagctcgatctggtaatgaaacaaggaattgacacgcgtctgaaacagcccaacatcatgaaggccaagaagaagaaaatcgagtcactcaagccagaagacttgggaatcgatttggttagtgatcgaggtacagcctgtctttgcaagcgataactaaatacggcgtttcaacagtcacctagaatgagcgtcctgagcgtatctgaacctcctaagagggttggaggcggcaaggtgagctctgcgcttacgagctgatcagcccggagaaatggttcgctgattcgcttaacaggttgagaacgtggacgagctggtacagaagctcaaggatggagggatcgtataagatgtcgtcctcccgcttgtaataatcgtggtaaaagttgggtacaaacaatgaactggagatacatctgcgtcatctcaaaactactgatcgctatcagacatgcgagcatcttcttcttcttcttcttcttcctcctcctcctcttcctcctcttcattttccccatcatcgctcgcccgattgattctcgagctgccagcccggccactgttcccgctcttgccgttgttgttaccggctccaacgcccaacttcagcttgagctttggccccgaaggtcgaggggtaccttgaggacccggggtgccctcataggcagatgcttccgtgctcttatttccgcgcaagttgagctcattgagcttctcttggtagacctgctggaagagagcctgaagctcgtttgccagctcaaagatttccgatccgtcagcgttgtagatccgagcgttcgtccagatttgcatcatgtctcgttcaaaggtttccatgtctcggtaaacggagcgcgtgatgttggtctgaaccttcttcagccacataggcgacttgatcatatcgtagtaaaacggaacttcctgtcggtcaaagaggacgccaacggatcagtgtccagccatgtcagggcaggcctggactgatcaacttactttcggcaccttatccgcaaagacagcagcggctggatgagtaaggatttgctgtacgatgttgtattgggtcgccttgtaaagtttgatcaccgcaggatcgatctgtagcaaggaaatgagcttctcgacgtgctttcacgagtttagttgcactgacgctggattttgcgtcctcttcggacggaccgacagaagctcgtcgcctgcgtttgcgaggctgatcgtcgctgaaggtagaagccgcgtcgtccacttcggtcacgccgaggttacgtttggcaccgcggccctttttctgcggctgaggagtcccagacatggaatcggtgtctttcattggctttgctgcggcccgtctacgtctggctttgcggtcttctgcggtatcaccatcctcatcgtcgtccgagttgtctgccccaaacagatccgagtcgttgaactcgtcgttataattgatagcgactttcttccgttgtcctcgcccagcgaaaagatccgcctcccgttgtagtctctcctcgtcgacgacttcgtacttccgagtgtaaggctccggcagttcgtcgagttgaatcaagcggggcggagcaccagtggcaatctcagtcgccctgcgctcctcgtccatttgagcaaatagaacacgttcttcgtcgcctctggccaaaatctcgttcagagtgtcctcgtcgggttccgcgtcttcatcgtcatcttcattttcacgctccaaaagtgatcgctagtcgttaccggtaagcttgagtcggaacaatcatttgatagcaaaggaagaccacgtacaaggaagctctcccgttcctcggcggaagtatgtccgtcgaattttccagcttggatgacctggccatcgagagcaagcttccgcttcgcgacctcgatgatgccttcttccactgttccggacgtgacgagacggaatactcgaacctctttcttctggccgatacgatgcgctctatatgtgaaagcgatgagctgtcgttcgctgggcgaaacagcgcgacccatgcgagaccaacctgtcttgagcttgcaagtctgcgtgagggttgtagtcggagtcgaaactacaaggcgtaacaaggtcagtccctatttgtcagctcgctttaggattgccccttacatgatgacagtgtcggatgattgcaagttcagaccaagacctccggctcgtgtcgacaggaggaaaaccttgaatggggaatcggggttgttaaaggtagagagcaagtcttgtcgaacttccgcctttgtgtgaccatcaagcctgcagaacttgacatcacggtagttgaggaagtcctccatgatgtccataatcgatgtccattggaagaagatcaaaacctgatcgcattgttcagatcagcaacgttgaaggtacctcgacgcagaggatgcttgccttgtgattggtcttgaaaagcttggggagaatccgatctagcaattcaaactttccggaacaccgccagaccttgtcggtcgcgccacccttcaaggagccaggatcgatgtcctgctccgtggtctggaaaacaaacgggtgttgacagatctttcgcagctgaatgaccatgttttgtagcgcggaggcctttttctcgtttctgtggcaggtaaaagggaatgttacaacatttcctagcattggtcatgctcgttgctcgacaactcacttcgcggacgaatcgtctcgaatcagcttgccaaagtctttcatgtgcctgtataggaccgtttgaagggggctcatcttgatcttgatgatcttctcggtcttgtcaggcaattccgattctacatccttcttcagccgacgcagcaagaagggtctcagaaccttgtgcagacccttgacaacgaggagtttctcttcttccgtcatctctgcagtttccgatccggttcctgcgaacggcgcattgaaccattcgtcgaaagatttcgcagagttgaagactttcggcaatacgaaattcagcaaagcccacaattctggaatgttgttctgtagcaacaacagattcggcttagtctcagcgtggtgcgaaagatttaagtcgggtcgaatcaactgacctgtagcggtgttcctgtaagaataattcggaatttggtcgagtatttctcgtttaatgtcttcgccaatttgctctgcgcattcttcatacgatgtccctcgtcgatgatcatgtgatgccaccggattctgccaagggagttggcttccttgatcacgtattcgtacgtcgtcagcaacacctggaagtcgacgcgtttgacttgatctgccagggcctttcgactctgtttgtctcccttcagaatcaggaccttgacgccaggtgcccatagcttgaactcggacgtccaattcgtcaaggtagaaagcggaaccagaacgagatatgggccattctcctgcttcttttcgatgagatatgtaatcagagaaattgtctggatggtctttccaagaccctttgaatcgaccaggggcgtcagtgcgaagcctgtgagattggttatacgggagcaaagcttaccatttcgtctgccaaaagtccgttcagcttgttgttgtacaggctgaccatccactccagcccttgaacttggtaacctttgagggtaccaccgaccaggagatcggcttgcttggtgaccggttccttgattctgtgggtcatcgcgaggtaatcccccttggcgtcttcagccgcgccctcgataggcagatcagcgttcctgttcctcggctggcctccatgcttgacatcctcctgctgcagtttgacctgattggccagcgaatcaagataggcatccgttcgtttcagcaggtgcgtgattcgggtatcctttgcctgatcaatcagtgctcggtagctgtcttcatcatcgttcttgagcgccttgagacgttctttggctagcttttccagtcgtttctgctcgtcccgttcgatgtccttgtgcatcctcagaactgccagaccgagacgcttgctcttctcgctgttacggcgcgatatctcgaccagggctactccgtgatcacagattccgcgcacgtattgaagatgcttgtctttactctgcctctcgcgctccaaacgttgccgtttctcggcgtcctctgtctccttggcgctacgtagagtgaaagtccgcatcctcctgaagtccgtcctctcgctcggcaagcgtgtcgctgcattgacatcccgcaacatgtcttcacgaagcagcttctgcttgtctctgagtctcaatcctcgcagctcgatgttagccctgatgttagcgggagatatttgctcgccgcccaagggcttcccattcgcctgtaccgtcagattgggcaccggtttggctccattcagagatccgcccgaggcaagcatctcttcgagctcttgttgtctccagttcatacggctttgtaggtaacgctcatgttcctcctgcaccaagtatgggtcgattcctttcggcagcaacgacggaactagcaaccgttggaacttggacatcgagaatggcacgtccggcgtagggcgatcgaggtaaagcatcggatcattcgatagcgagttgtatgggtagatgatggattcatcatcgtactcgcccgcgtatggacgttccttggctagcaccgacgtcgatggaacgctcgacttcgtcctggtcttgtccatctccatgagagcctcgactgtcttatcagtgacctgggcatgtggactggctggtccagctgcgggtgcctcgcccatgacggcttgttgaacgtgttctggcaaggcaacgttccgctccagatttttgaaagcatgcacttgagtgcgcagttgtgacagttgagccggggtcatgttcatgtgactggcggcagcaggaggtaccgaagacgaggcaggagaaccagcgtgttgaccattacttgcgggacgttgcacgcctccggggccatgggctctgagcgatacgtccacacgacgcggtcagttgaaactaatagtcatcaacgacccaacaagatgctcacgagaccagcctgagaacgtccatgaggctctgcaagtcattgcttgtttcctctgtccatccagctttcttcaactgctgagctttctgtatttcgattttcaccactccggttaggtcagcccagtccgaagtcgcaagctcgccatacgcacgatcaggatggtattgaacttgttcttgtccatggctcggatgatctgctgctctgcctgagggctaaaggcggtcctcgtagtgccgggcaaacgcaacccagactgttgaccgccatcttggccatccatcatggccatgctcgttccgaaactgtccatctcgatgtcaaattgatgaagacccgaggcgttgcaaccagtgggaaccgaacaggtgtcgcactgatggtagacggaatgaaacgcctttccaaagtaggacaagaggacctgaagacgggtcaggaacagttcgatgcgaaatgcaggaagatgctttgttgattttgtgtcgatcgcgtccggtcggccgaacctgatctaacgagttcgaagactgggtgatggtgattccgagtggtccctcacgaggtgaagcgacggatccggggtcgacgagacgagatggacaaaggctacgagcacgtcgagggccaccttctgatgggtgctaagtctgcgacacgaaagttgaagagcgttgatctcgcagctgtgttcggctcgctcaatctctgagagcgttacgagagattgccgaacgatattctacgagccaacgtcgaggctggtccccggagtgaaacccgttactgtgggatagcatcggtcacgatcacagtggaggtcgacgaggcaaacaaagggcgagccagcagcagggacgcgatgattcgcccgctcccagcctgctcccactctcgccctgggccctgccccccctcctttcacgcgtcgcccccgtctcaatcaccttcggatccggaacaggaaatgcttcctcacgtcacaagcgcacacttcgctccactcgcgcttttttcacacgctaactcgttgacgacggagggatctggtgatgctcgatgggtcattgtgagtcaaagcatgtatgtataagctgaagggtaaaacatctcgtgaccacaggtattattgatgagcaaggatcgagcttgagaatacaatgcagatgacatggtgcgtgatgacgaggctcgcgagtccggaacaacgacggtaggcatcgatttggcatcaaggaaaagccaccaattctttgttcgtagcatgcggcggcctcttgattaaggccaagagtcgggcagacaaaatgactggatggcgcgaatgggtccgtttcagggtgcttacgccgggtcgtacgggcaagctcgcctcgtaagaaccatgcggacattgtacgcttccgacacagttagaacggcatcgcttgcgggcaactgcgcgtctttgttcgggtaacgattagcgggccgtgtaactaaagccagacaaggagtggagccaactactactgcttctagattggaacccaactactagtgtttcgacgtgcttccgtaagtcgcctgtctcgctcgctaaatgtctacgttgtcaacaagtgcctcgacgtaggaggtctgtgtgatattgttctgtcaggaggacctgaggcggcgcggcgacctgcgtttgggtaccttgcgaggttggggggaaacgtcggcgtgaatttgggccttcaaaaaagaaaggtgatgatcgccggtatcgacactacccgaaataaaaagatccacttcccgccatgccgcgtcgcgctgcgactgctgtcaactgtaaacgaccggaaagtgaacccgtgtgttcgtgtcggccgctcaatcattctacgccattcgagccacgtttattgacgagtcgcgagtcgttcttgcttcacatcccggaccctggcgccgtgatgacgccgtcccaagcacatgaaatgataaaaaggtccctggcgcttcccgtgatcggttttgtcaacggcatattcatcagccacctcccactccccattccggccactccacgaagcacaagaaggatgtgttttgggtccctgtcgccgagaattgcacacgagttgttcccttcgcgtcaaagttcgggggcctcgccgttcacagcccccttgtctttcttttttcgaaacatgcgatctgtttctaaagtcatgtctatcgcctggcgatccatccccccttgttcgctccgtcatcagcaacaaggcggaacgcggagacaaccacgatcgaagctcaatcgaagccgtcgcatcggcccttccaagactttagcacccttgccggttcaagtcgttcctacccaggatctcggcactaacctaagctgcctccatcaacctttgtcgtcgtccatccgactgtcgcacccttttcgcccacgcaacgtatcacatcggcatgtccccggttctttcagggtcgaggaccgccacaatgatggatgctgtgatcgctatgactacgtttacggaagttgaacacgaatggcctataagctataagcttgtgttcgaagatgatcggagggttcggcctcgaaacgttcggaccatcgatctcaggtcgccaagacagatagacagatagcagtacagacgacatcgtcgaccctagctgagacaggtcgacaccttacagcgatcagcgaccagtacccgacccttcctcgaggcgcttttaggactaccccgaccccaacctcgattccgcagcgactctgctgtgctgtatcaaccccgaaaggaggttgcggcgatatcccgatccaccagcccaaagggattctactatttgatcaacactcacgacaacgacctacgacggagagacgatcgaaacgtggtctgcctttaacatcgccaatcattcttaaaggaccctatcagactcttatcagcgttcttgcccctccacgacctccttgtctttggccgaaacgatcaagggatcacatctctgttctcccggtggttccgttggctcccctcgtcagcaaggagaagaaatctgcgccaatctcgacatccaggtcaatctcgagctacataacggtcacactgcgtcggactgctgtttcccatcattccttggctgagtcgtgcgaggttcgacgtcaacgttatcacgatcacccatcgcccacgaagccacaagacactttcgtctaccggatatagaaacgtcccgatagacgcccggcgacatagcctctcgtgatcttgtgatcgagagacaaagaggcaaccgcacccgacaacagcgagtcgagttcgacctttgtgtgcacgggccgccactagccacgagaaagatcttttctaaactgtcccgagtcggttccctccctgtcccgcctcgggcttgatccgatccaccacacggagcgatagaaggtttcatcagaaggggaatcttctctagctcgggcagacactacggatccacccggcaaccctcttctacccctcgtctttcgaaacgaaatcatcggatgacgtcctgatttgttgattccttttcgatacaaactcgcccttctttcaccatcgacggcaacggccataacacacccacaacgacagcacaggcgatcgttgatactgtaaagaacctcctcccgcccgattgcaacgaaacgtcaaccttggcccgcaggctctgagcctataaagtgccgaagacgaatcatccacactcttagcagtccccgtcgtctctttttgcactcgaccttcctcgaatcgttgctcggtgcagacgatgaatcaagactacgagtgggaacctcctttgttcgacgaaggttacatacgccatcaacaatctcaccaggactcgaccagcccgccctcaaccctgacacggacaccggtcggagtttacctcccaacggtgtattgggactcgaagacgcctgacatgtctgagttctcggcacccatcaccttcaactgggttgattactatgcgggtgagttcgcggtctgtgacatggtcgtttgccttcctgtttagatactgattgctggggattacgaacgatgatgacagacatactgtgctttctctggtttcgtgaagattcttcaatccaaagcgtaccatcttgccagccaggatatctcacgcccccatcgaagtcatctacgacacggagtcgaccaaccttggcttttcaatgcttcgtgcaaaaagtgatcagcgccaccgcggtatctcaggcagtccttgttctcagtctctggtacattgaacggctccgatcgaaaaatgtcgccgcaatcgcatctcctggttcagaatacagactttgtgcgacggggatgatgctagcgaacaagtacctcgacgacaacacgtacacatccaagacttggtcgagcatgaccggcatcccccttaacgagatgaacgtgagtacaaagggatcagctaaattctgttctgccgtcttgaactacgtctgaccacatgattgcccccttcccatagctgatggaaatcgaatttctggcctcactgaaccacagcgtagggatctcggacgaagcctacctctcttggcttgatgtcctcgggtctgtcgcgatgaccgcagcatacgcgcgttacagcgtatatcaaccgattgcgccctcggactaccccttcacctttgaatcgtcttatctcgctccttcgtatgagtgtccacaacccattcgtcatcggggcagatcgaagtcttctgagccacatcgacgacctagcaagagcggtgcacacgagatgccgtttctgcagcaagctatcaagaccatcgagatcgaaaccggttccagcgagagctcgagccccctcgcgctgtccgcgcccaggaaaaggactgccgctcaggtcttctctgctggacacgaccgagctgtcaggcgtatcaagagcacacagggcacccaacggcgaaacacagctcaacgcttatttgcggggaacactagagccagcagcgctgtcaatggctcgcacctggccatcgaatcctcggagaccaagcctcctccctccgcggtatcgtaccagctgatgccggcgctctccatgtctggcacgaactactcgatgccggatgacccggctggctcagggatgtctatgcaccaaggatccggcaaggaaggatacctccagttaccttacgactattggctaggctaccagccacgacaagaggttagtctgctcgatttgaaccgttgcaacactatgcctctgtgctaaccacaaggattcttacgcatcacaggatctgactttctacacggtagcagcatcccccatcgaagacgaatatctgcctcagcacgatgaccatgcgacaaaagtcgggaaaatgcgggtgcccaaccatggccaatatttgccgtcctatcaacaaggatatcaacaaactatgccgaatcagcaatacggtggctacgcaccacaacaggctccaatcagcgcgccgtatacatactggcgaaccgacatgcaaggtcctcgccgactctccgcttcgaatctatacgacatccaaccacaatacatcgacccttcttgccaatatggcgccgggtcgttcgttcaatactgagcagacggctacattgaagcccgtcgtctcaacaacaccatccatagacaggcacggccgtcatttgtgatttttcacaatgagcagcacagactagctacatcatacacgacagatccgccacgaaatcgcatacgaccccgatcacggattgttactaatccctgtcacgtcatacatcatcatcattacgctgtatctattagtacacccatgggacgcatatcgtacccccaaatctcatatgcttatgatcatgtaacacgccgcttccacccttccccgaaggtgaccagctcaatagttgaacttcaaggaacgcaatcttttctggctggtaagcaatgacgttgcctgtcgatatgttttcggagcgaggcagcccatcctcccagctggaaaataacagtcacccttcccggtcatgggatatgatgtctcttcatcaatggttctgcctatcagcattcaggatgatttggtggtgcgaccgacattttgacaccgattacacggcaagaggcacgacaatatatctgatgatgtgcccagtcgccaattaaaaacggtggcagagatgctgtaaccgggtccgccttcttctccggaccacgggattgagcgcgacccattaattcgtgcaacgatcgggttctatccctttctctcatcgcaccacagtccatgaatcagagcttggggtatgacggatgatggcaagcaaaacagaaaaggcagaaagcgatgacgatgatgaccatggaattctttgccatatcactgctgaagcaaatcacagcgctctacctcccggtatgcgacgatacagatcgatcgttggactcaactctgagctccgacgctagttgtcagcaaggctctccaggctagagcatcaccagttacggcggtattcgatcgaggtttcatctgatgctagacgcctcgaagatgaaactggttattgaacctttctttgatgacgtaatcatttcaatcctggctcatttcggacttgaacgtgatcgttgaccgcggaggggaaacgcgaccgtaagtagggtaacaacctataacctcgacgtacctcagatacatcgtatccctaccaaaggagatgattggaaatccttcaggagctcaacaatccatcacgttcgctgtcaagccgcagagctcgtaaacaaagagaacatcgccctgttcaaaatcagtaccaaaggctcttcctcgacagagccgaacaggggtccgtctgatgaatacagtaccttcaagacatagctcgtcatctcgagcatgaacatccaaggggcatcggcctcgccgttcgctcaggcgggccacagaactaatgccgatcattatcctgtagatcccgcagatcgaggcaacggacaacagatgaacatacctggagaatcggctggcacgacaggtgccaatatcaatcggccgcggtcgacatcaaacgtatcaacatcgtttccctcctctcatgatgctttcggtctatcagctagtccatcggcgacttcaaatatgtcgaaggccaacatgattgggattgcaagcagcaaccggcagacgagcccatggtcgcaatcaggctcgaacggatacggcttgtacggaatgggtaccaatgcgaccttgatgtctgatacgtctgccaataactcgtcaggcaatcaatttgcgcatggcattttgccgacatccactctacttggcgatccgcaattccgtatgaatcggccctcaggattgagtcaagcgtgggcaggggatgatatggaatctgaggacgtctcgacggcggcaggcggttcacatctcgggactatggactctgccaatacggacgtcgaacaatggcgcagtgctcttgagccgccttcccacatgagacggagccaatcgtcattcgcctccatacccgaccctaaatctcctcatctcgactgtcagagtggttacaacattgggcacaacgccccgtcatcgtcttcccggttctctatggcactgcggcgggtgtcaagcgagcattcggccgtgagggattcgtcggagatccatggtacgcatcgagagcgaggaccggacgggtttgatatagaaggaatggatcaaggactgcaggcgcgacatggtagcttcgatcgcatgaccaagactccgccgcctaaggggtttcggtatcccttcggcggaaaggctttgaccggccatcgcgactctctagatacgatcgagacgagtggaggcagcgatgagggcagtaccgatcgagaacgtgggctgaactccgggttcgctggtgctgcgaggaggagaagcagtatgatggacacggctcaaccaagactattacctgcaaatctccgcaagactctcgctgcagaagccaatctacccatgcaggagatccgttcggaagctctacttcagagattgattttgtccaacacggagtcactccccatgacaccaagaccatcccgtcgaggaaggttgctgaacagctttcccgaggcagtatccgacgatagcgatgatgagcaggaggatggtgatagcagtgacgaggggcctttcgcggtggatgatctggtcacaggggaagaaatggctacaggaggcatggacgtggatatgtcgggtcaaaactcgtcaccgttcacctttgctcaagcgggaagcgcacgccgcacaacgcaaagtggaacacagggtcgtggaattccggggcgagccaccaccagctctggaatctttggtcacggcgctgttatgacgacggaggaccgtcacgaggcgagagccagtcaaggaagtgccagaggaagcgatgtcagtcatctgttcccttgccctttccaggacgaagctgactcgcgtgacctgaccgacctttaggccagcggtagtggcatggacgtagcgggcggtcccaaaagcaatgcaactgcctggagggaaagtcccgtgactagcggaaagaccaacaagcggaaaggtacgggctacgcatcgttcggactgagggcatcagcgctgacctatttggtccacgccgttaccagccgcgtttgacgatgcacgtttcgagccgtacaataagcgatatcgaccgggggagcagtcgccatcccactgggcaggcacgatacctcctggtcctatacctgtctcacccactgcgcatcacatcccatcggacccaatggaattcacgtcgcacgctacgagtcgcacaatcaatttcgccaggtcgcgagggggatcccctgctgctaccagtcaaatgcaagcaatgcggacagtttcgcctgtaacatcgtcaccactggcaagtatggctgccgctggatcaaatggaggtcctattggaatgccgcctggaatggcgatgggataccgaccgaccatcggaatgggaggtctaggtatgttgctgatgagcaaacggaacgggcaaggcgttggaaccggattaatgagtaacgatggcgagaccgcggtcgcagagggtatcggcgggatggacgttcgaagtggaaatcaagacgaagatgagcaggacgagatggtattcgactgatcgcaggcgagcgacgatgaccgatgacgacatatagacgatgtgaaaggacccggggcgggccggcggtcccctttctttgtatttttatcgattgtacatggtgatccaagacacgacatctggctagctcctttgctcagaggtgcatcaggttatgctccggtggaagttccgccattggtggctcccttgtccggctctttgctactctcgctctcaaagtcagcgttcatcttatccactcgctcgttcatcttgtcgagccatcgttgcaacaggctggcattgtccgcctgaagggccgagtttcgctgcgagagctgatcaagttccaagtgaagggacaagatctcgtcatgcagatgctgcggaccaagtgcatgtaagcggaagtagtcaggtgatctgcacacgttcgggccactcgaggccgaatcgcctcttacctggacatcgttctccttgatcttccacctctcttcgtgctccctctcccgcttgctcatcctctcggtcctctccttcatcaacctcatctcatccttcaatgctcggacttcgtcgtccctctcccgtagcgtatcggtcagccggagctgtttatcttgtgatgcagatctcgagcgataggcgtctgaaagctcggctcgaaggtgtgacagctgacgttcgagtgtgacgatgtagctccgagctccggcactggatgggttacatatcgatcagggatttagccttgaggtgtaatgaatataaagtagaatgctactcacttgtcttgcggaccgatgccactggctccttccgaggtcgattgcaaccatgccgcattgcgttcccgagagtcttttagacagatggccaggttccgatctagaggacgaaagcatatcaagggaattatgagccacacaccactagagaaaggtagacggtcgatgcgatgggatcgactgacaagcctggatgatctcggcgtgcgcattatcggcggtctgacgttgttcgagcctggcacggtaggttgcctgccatgaggattcggctggcgttgaagcagaaaataacatggacatgatcgttcgagtcgtgcaaaattggtttcaaatgacatacatcacggtcattctcgggaagagagttggatacgaacaggctctgagatcgaccgtaatctggtcacgatcagagcaggagaggtagctgatggtcggtcattgcgaggttcagccgtgacgtaacgttacgtcagagttagaggtagtcataagaggacacttgggaatcaaaagtggtggaaataaaacttggttatcattcgcgtttcaaggggactcatgaacaaaagagattctcaacgtgatccgatcaattcgataagttggataacttcaatcacgatccacctttgagaaaggatgtctctgagtttgggtctcacagtttaatagtcgatgaatgcctttcaccgatcgatctacccgaggtaggcgtgatgcgtgaaccctcctttgagggaagcctcgtttgggtggatcggagaggctccaacaccgaaaccgaatcagatcaaagcggtggaatcaacggaatcacttcggtcaaaattccacgaccaacacgacgacaacacgcatcattccatcagatctatcctcgcataacgtatttcgcctctcaaagatatcgagcgatcgagctctgataattgtaaaccagagaccacagaatcaaagctcgtaaacacaccaccacatcaacacccaatacggaggaatcaggaagctgcagaaacgatatcttgcggactatagatccaaagaagttcaagatcttgaccggaggccaatgatcacattagtactcgcctctcgacatcgccagacactgtcgtcccggcaatctcatccatcctggtcgtgtgccacgccttgacctatacaagagagcagctgcttccaggggttgcatcaacggcagtatctctttcatgcagagatttccttttcgcatagctcatctgtcagcatcatgccgaaccatcaaattggggatcgcgacgacaccgcctccattcgctcggcggtctccagcatctttccctctttttcatcgacacgaaaggggcgccgacggcctctctcgaatttatgggtctttaccaacacttcgcgggacaacacggaacctcaagctggcacgacgaacaggcctcaatcaaatgcggcgtgctattccgacagtgtgcaccatgtggttgacggcagagagactccaactaccaaatctgccaatccctggcaattgcaacaaggctttgctcccggcactccccttgctcccatcctggacggcgatactactccaacctctgctcagacatccattccttccactcctctggacattggcggcgtctcttgcctaagggggaacgggaaactcttgagagcacgatcgtccgcgttgaactcgccctccatttccaatcgatccagtccgaccaccactccaaagaccactttgttcgcacagagccagacaggaaatcccaattctggcataggaggggaggaccgtgtacccgtgcccaagcaaattccatcagtcacgcttcctttaaaggtacgtttgtccgataggaaggactcgaccgatgctcacgaggtcatctgtcggcgacggcagaaagatattaagcggaatgacgacatcgtaatacgcaagaccaaatcgaaagaagaggcattaagcattgcacaagaagtcgatatcttggacctggaagagacaccgtcagagtacgagaaaaacttgccaggtcagtgcggtctcatctttgcccttttacatagtactgaccgataacgtctcatttgagacaggtctctctacgaccaccatggatgatctcatagagggtctgcgtcccaagaaagctcgaagtcgtggagacatacgatcgcagggtcctcatcagcgcaatcaagacaacggattccaacgggatgtagagagacggctccaacccggccgagtcagcagtcgggatcttacctctattgcagcagaattgagtcgaggcaaagtggtcccggtcagattcgcttcaagaccccaaaatgggccgcagagcatcgatgacatcgtaaagaggcacgctaatgaagctccagaggtgtttgggctgagtcgaaaagcggtcgatcagattcctgcttgtcgaaacggtcaagcggacgatattcttgacgaagcgatcatgacacgggacctgatgctgcaaagactggagtcaaaaaccgtatcaatctcgtctggcagcaccgtttccttgcaacatattggtccgccagtaccgcctaagcctcagcgatactacgctactacgacgagttcggatacatgggcctctctatcgtcatccacgtcatgggagagcctcaagcgcaaaatggcaaacgacgatgatcccgatcgcatcatcgccaaatacctcaaatcccgtcgcttgaaccggattataagcctaactcgtccaggtcaagctggacaggtcttatcagtggcagaagtgggaaatccggaggggtacccggtactggtctttttaggtttgggttgcgtgcgctacctgatcgccttgtatgacgaggtcgctcgggcagaaaacatccggctgatctgtattgatcgatggggactcggcaagagccaggatgtggattccgaacgcagaggtttgctcaaatgggccgacgtggtcaaggagatcatggaccagatggccatctcaaagtttggtgtagtggcacattccgctggggttccctatgcgatggccaccgcgctgagaatgaaggaacgcgtcaacggcacaattcatctgttggcgccgtgggtgaacatcgaaatcgatggaggtgagtacggaaggcaaattacccctctacggtatgatctaagactttttccgcgacaggctacaagtggttgaaatacgtcccctcaagcgttatcaagaccgctcaagcaacggaatggaaactacacgggtggaggttaggcagtctacctgcttcaccttcggacgggattggatacacgacccctaagtctgcgcggtctgtcatgggaacggcctcagggtattttgtaggcagactcggtccaccccacgtatccccctttccctctcccatctacagcagcgagtcgctttcccgatggtcctcttccaaggtcaacctcggcgtttcgccgagaagcgacaggggttccgaggtccctcgtcagccacccgtgtctccgttggtacgacccagaagctccgcgagtcggttggtccggagcgtatccaagcgtctcaagccaaacgaagacttattactgcgtctcagagacagtcggaacctagcacaatgtgacacatactacgcttcgccgaacgcgtctgactccaccttcgagacggaggaaatggtggctccgctgggcggacgcatcagtaggatggacaagatcgtccccacccgtaccacaagccttccctctatcgacctcgcgagacaggaatctcgagctcaaagctcggcgtctacgctatccagtccagtcccactgaccggcgagagttccttggccactgcaatccttcgagcatcacattctgaagcgctgccagggggaactgccgatctcttggcgattctgggcaaggacagcaaggactggggtttctcgtatacgcatatcgaacacccttgccaggtttggcttggcgaaaaggatgacaagattggagatagaggcgttcgatggatggaacgggaaatgaaacggtgtcgggtcgagattgtcgaaaacgaagggcacaatctgttggcaagcggttttacgatgttgaaggtgtttgctgcactgcaggaagatgttcaagcttggtcaccgcaaaggtagcggtctctgttgtctgtttaccatgatgcagaaagcgacatataataccatctgtaggtgaattcaatactgccgcaaacctgaaacatacctcgtttcgggtcaaatataagcaagtcacaacttggaattcgtttttccccgaaaatcattacgtaatcagatttttccccaactttgggccgagcaggacccgttcgacctttgggtcagctcgttcgaacgttgtgaggtgctcattgtgatattttcgtggttacagttcgattagatgcgaagcgatacttgaccttgctgtctctacgatcatcgaacgcagactgatctcaaaaagtagaaactagaaaaaaaagcaaattccccacaatgtccgaagctcctatcggtaagaccgatgcgagagataccaaaaaaatccgttttgatacatgcttccctcatagcccttctctccgtctatgacaagaccgggttgcttccctttgccaagggtttgaaagagcttggtttccgacttttgggttcgggtggaactgctaagcagattcgagaagctggcatggagatcgagtaggtccgaagctctgaccactgctacgtgatagttgtcgttgactctgttgataccatcatgactatagggacgtttcctcgatcacaaaggctcctgagatgctcggagggcgagtcaagactttgcaccccgccgttcatggaggtgagccatcaaatttcgtatagcaaacaggaacgtgtgtctgaattgcctgaatctctaggtattctctcccgagagatcgagtccgaccttgctgatttggctaccaaccaaatctctccgatcactttggttgtatgtaacctctacccattcgtcctccaaacgcaaaagcccgactgcaccttggctggtgccatcgaggagatcgacatcggtggagtgaccctcttgagggccgctgccaagaaccacgcccgcgtgtccatcatctcgtccccatccgactacgacgtcatccttcaggaatggaaggagagcggcaaggtttccgacgagaccaagcgaggtctcgctatcaaggctttcgagagcaccaaggcttacgacgaggccatcgccgactactttaggaagatgtactcgagcaccgactcgtctgccgactccaaggccggagcgggcgttgcctaccagcgagtccccctccgatacggagccaatccccaccagaagcccgctcaagcctttgtcgagcagggtgagatgcctatcaagagtgagtctagtcgacgcggattcatcacacagcgctcggcctgatgtctttgttcccgacgtcagtcctgtcggggtcccccggatacatcaacctcctcgacgctctcaactcgtgggctttggtcaaggagctcgccgccgcctttgagcccgctctccccgctgctgcgtctttcaagcacgtctccccggccggagccgccgttgccattcccctcgacgaccgtgagaagaaggtctttggcgtcgacgacttgaaagagttgtctcccttggcctgtgcttatgcccgggcccgaggtgccgaccgaatgtcgtctttcggtgactttatcgccctttcccacaccgtcgatacccctaccgccaagatcatctcgcgagaggtctcggacggtgttatcgctcccggttacgagcccgaggctttggagatcctccaaaagaagaagggtggcaagtactgcgtcctccgaatggacgccgactatgttccccccgagatcgagacccgtcaggtttacgggatctcgctccagcaaaagaggaacgactgcaagatcgacgagactctcttcaagaacgtcgtcaccaccaacaaggaggtaagtcgagtccaacgggagctcggtgtcgaaagctagctcatagccttttttccttggcttcgatcagctcaccaagcaggccatcaccgacttgaccgtcgccaccttggctctcaagtacacccagtccaactcggtctgttacgccctgaacggtgccgtcatcggtctcggagctggtcagcagtcgcgaatccactgcactcgattggcaggtgaaaaagccgacaactggtggttgcgacaccaccctcgtgtcctctcgcttcccttcaagaagggaacgaagcgtgccgacaaggccaacgccattgacctctttgtcaccggcaacgtcttcgacgctgaccctagcgagaggtcgcagtgggagagcttgttcgacgaggttcccgctccccttaccaaggaggaaaaggaggctcacatgaaggagttgaccggcgtcgcttgctcgtcggacgccttcttccccttccccgacaacgttcaccgggtccgcaagagtggtgtccagttcttggctgcccctggcggttccatcatggacgccgagtgcatcaagactgctgacaactacggcatcgtctttgcccacaccgaccttcgtttggtgagtgatacccccggcctggcaactatcctcctaccgcgacactcagctgacccttgtcccgatgcccatcacagttccaccactagaatgatatatcaaaattcccaaaaattgtacaagattcaaaacacttcgttagattggcattagggtaattgaggcttcaaccatactcgttcgtttcaacatgatggggaatatgcgaattatgattccgtccgcgtgatggctcaagccgggtcgtgaatcgatgtcttgctagatctactgaccggacaagcgcctgagttgggccatggctgagagagcgacaatgatatcagcgagtgccgataccacgatcaccaagccccgactgacgagcttgctcaggttcaagaccatttccggcggcgatgagcgcgcgcaattgtttaggttccatggaacgacgtctctgtgaacacagtcgacgtgcatgagctgcgatgccttggcatgaactctcatctgcagcgcacctttttaaacgtctccaactcgtctaggttgatttcgtacggcccttcttcgattcgctttccggcttctttgcatcgggtgacccagctaatcccgatgaggtacggtttcggatcttcttgacggcggtaccaagccactgtcgaagtcttgcccgatttgtagacgatatgtgtgcatgactctgtcggcttggccaagacctgcgatgattaaacccaaagagataagctaggaggcgagatgagtacggttcaagcgcgaccccgatcacgaacctttgctccgcaaaacttgagcatctcggcaaacaccgtgccggcgtcatcaccctctgatgtccgcacgtcgacaaaggccacgacgcccttgaggcaaccagttcccgcctcgctctcgagcaggttctgaaggttccccccgaccgtccccgaacgaacaagctgggactcgggtgcggcgctcgtcgctctcgtgaaggtctgggtcggtccgtgtccggcttgatctcgagcgtgggacgtaggggaagatacccgtctctggccggtcatcgtcgagctcctcttcaacgttgtcgttcccggtccagcaggtctagcaaggtcgaccgagccaccgatcgactttgcagcactgcttgccgtgggcatggcgaatccacctagccggcgcttctccccctcgacgatcgtattgggcgtcgtggaggacggcttgacctgtaatttcgccagggcggcgctgagaccgtacaagctccccttggtttcggaacccaacccttctcttcgactggcggcgattcgggagagaccgctgtcgcccatcgaggtcgacaacgacgagtccatcggatgatccacgggtggcacggcgttacgcacgacctgacgaggaggcgccccaaatccggatcctagcgagctggggtaagacggtttcctcgtgaggaaactcgacgtggacgtggatgacccattcggcctggattgcgaggtcaaagctccaacggatttcaacttttgccccgtctggccggtactcccgacttttgatggcaggtacgtgtcatccacttgcatcccatctccacctgatcggactgtaccgagagcgctaggtaacgtccccaaacccctcttctttgcctctgtcccgggtgggaccgtcacatcccccatcctcttccttggcggggtaggtggcctgatgatgatattggcaaatctattcctcgtgtcctgttccaccatcatcccatccgtctgtgtagaccgctgaccgagcgccttggacgggctatctgagacccttcttcgtttccccttgtgtctcctctctggggtgacgatgctcggttcttccgtctgcccgcgcgtccttcccctgggtctcgccggggagggagacaaggcgggtggattcgatatccggtgcgcccggggaggtcggggtgattcatgggcgaggataaaagtcggagagtctgatgggtgggacggtcgtttacgtttgatctggaccaagggttctgacggtcctttcccctcggtcgtgtgagtcgcgttggcgatcggcaagattgacgaggatgtcacaggggagaaaggtctgttcggtttcttcggtgacgatgaagcgccgaatactgatcggtcgggtcctagtccagacgttgtcgccgccggcatcgccgtcatcacatgctgtgtgcgtctcttttctttccgacgaggggtcaagaggagctcgtcctcgctctccccgtcgtccatcctgaacccacctggcttgatctcgagccgaggctctttccgcgaggtcgatgggcgcgagtcgaacggactgggttgggaggacgagctggtcgatgcggtaggaggaacgagctccatcgaccggatatgggtgttcatggtcaaaccactcgatcgtgcatcatctttctcctgtcctcctctactgtgggcatcgatgacgtcgccacccgtttcacgtccttcttgctgctgctgctgctgctcttgaacgttcttgaggctgtccaagaggacgccgcgtttcttacccttgatgaccccaccaaagaccgtctttccgccattcctctcggcctggacgtacgactcgaggtgtttcctgttctgtgccaatttggtcatggatcgagtttgagcggaacgtggtggattgtatgacgaggacgaggatgatgatgcgacgggtgcgccgatgcccggattgatgttggctggatgagtggacatgctgcgtttttggtacgggatcgaggtgctcggtgccggtcgcacgggatcgccaggagacattctaccacggcgttatatctctagggtccgtaaattgtttactctgaccggctcagtgtctatgtcagacgatctacttgggtggtcgttgtaagtttcgagtcggtttgaattgaaagtggaaagtcgatcaacacacgcgacagcatcatcaagatcaagatcaacaacacaacaacaataaacaaatcaaaagcgcaacagactcgattacggcaatgacgatatcacgaatgactggtcacgtgatcatagggatgatcgtcgtcatcttgttacgtcatcattcagctcacctcccggcccacaccatcccgacatggttaaccctgacacacgatttgatatggaatgaatctccggctggcgaagcggtgaaacgttggtctagccattcattcaccgccattcgctgttgggcctggacggccagacggaatatcaacgcaccgaagtgtgtcattgacggtgcctcaaacacgcgtggtgcctcgtgacgcagagccgcgggcgtttagattgatcccgaagggaaatatcgttcgaaaagcaatcgttcgggaggtttttgcggggcgcgcttgctcgttggcgtcacatggagcctagtgatcgacgctcgattagtttgtgtccctctggcacgatgtgacatctcgccctaaagttgcagcgatgcggcgccccagagatacgggcacttgatcagatgaccaggtctcggttgagagccaaacaactccggggtttcgaatcttataagtagggtcggcgttgttggcagccgtgatggcacatcgccttctcctcggtaatccacagcgcgtctcccaatcagcagctggacagtatcgccaagatgcctatggacgctcacacccacgacaaggtcttgcaccacaacaaggtcgcagctatcaactacatcgccgccgtcttcgcagcctttggcagtttccttttcggatatgatagtggtatcatcggatcagtcatctcgccatcgtacaaccggttccatgagtacttccatgcgaaggactctccgctcgtaaacggagaggttcgagtcgatgcgaacatcacgggagcgattgtctcgtgcgtgtcgacgtagaagcgagacgttagcgaatgactcacaaccgactctgcttgatgctccattcagtgtcttcgctggaggcgctttcttcggtgagtctgtctgggagaggcgcatgccatacagcgacttacctgggcgtttgtcgactcataggcgcactgctcgccgggtttactgccaacaagatcggtcgaaagcggaccattcagctcggttcgatcattgctactgtcggtcagtactcggctgcattgcaaggtctcgcattacatctttgctgaatttgccgtctgttccaggctgcggtgtccaaaccggtgcgatcaacgtcgggatgcttatcgccggtcgtttcattgctggtgtcgctatcggatgtctgtccatgattgttcccttgtaccaggtgagctacgatggcagcctgatagtctccttcgtgacaagggactgaccactcatcgacggattttccaggccgagatctcgccccctcatgctcgaggtctgttgtccggctggacccaacaaatgatcggttttggattcttggtggcatctcttgtcggtaaggagcgctgggatgaggggactggctatcgcctctcttgctgatccagcgttggccatctcgcgaccgctaggattcggatgcgagtctctcagaacctcggacgcccaatggaggatccctttggctattcagatggtgcctgccgtcgtcctcttcggaggaatgttccttcttccctactcccctcgatggctagcctcggtcggccgagaggaggaggcgaggagagctttgatccgtctgcatggaggggaacggagcgccaacatggaagtgatcgaggcagagtacgcggagatcgaggcgcaaatcagctgggagcgtgagaacgtttcgacttcgccactcgacttggtccgcggaaaagcgaacctgcatcgaactctgtgcgggtgtctcgtgcaggccatgtgccaatggaccggtggtaagcagtcgaggacgcgcgacgtttcggagccgggctcaacctcttttttcttttttttctctttcttttttgtcgcgattcacctcgatcgactttctttccatcaatttcaatgttctgatggcttgcaacagtcaatgtcaatgcctacttcgccccgaccatttactcggatcttggctacacaggcaacaaggtgagagccgcacaaacccattggttgtcgagatatactcatttgaatttgttgcattctcgcgcgaacgttcgcgcgcatttccgcctctatccgtcccaaacctgccgaaatacgctcctactcctgattctagcccttgctcatcaactctatccaatcggtgtggtccctcgtagtcacattcgtctttattacgttcttggtcgaccgaatcggacgtcgcaagcctctggtcattggtcctttgttcatggctgggttcctcgcgtggcaagctggtatcgccagtcaattcactgctggcaaaggcaacggcggtctgggtatcgccggtattgcaagtatcttcctcttctcgggcgccttctccatgtcgtacggaccggtcagttggatctaccagtccgagatcttccctatgaacttgcgcgcgatgggaacgtctgccagtaccgccaccaactgggtaagtgttgcctgcctcaaacctctctgcttgcaaaatgctaacggctgctttgcagcttaacaacgtcatcatttcccaattcacgccagtgggcttgaagaacctcgagtggaaattcttcctcttattcgtcgcgaccaatttgagcagtgagttgcctctggtcccgcgcgatcaccttacgggaacaatcatgactgatgcgcgatctccatcgaaccaccagacgccgttttggcatacttcctcttccccgagaccaaaggtgagctttcatgtgacttgccgcacgtgagacatgaacacacgctgatcgatagagtctccctaggtaaaaccttggaggaaatcgcagccgtgttcggagatcacaacgttgtccgacctcctactgccgagttcgccgtcaacgaactggacgaggagaagaagatgggcgatttctcgcacctcgaccgcactgacaaggtctaaagggtgtccggcagtcactggctgccgtaagctatgccagtcgcgacgaggtcggtggatctcggtcgacgcaattgaagttttacgaggagctttgtaggaatccgtggtttgtaacagaagaaaaggttctatgcagctcgctaagtgcttggagtagctgtaacatccagaatgatctatcgtctttgtacaagtccgcgccgttgaagcgagttcttggtcgccgaggtccccttcgagggccccgctcgatagtcaggcagccctcgctggtgttcaggttactttcctcaaggatctcacccaaccggtttagtagatggcgaaccagaaggctagatcggtcgttggatatcttgaatctgactgagcttcaaccggggaatatgacgcaacgcatctcaaatatggtcaagatttgcttccacgcaccccgggaaggttcaactcgatcggagggatcaccatatcgcctgctattacgctctaggttctaggtgcttgcgaggttgtgaaacttgtactagtctgtcagatatcaggtgctatcactcggaatgacacgcatattacagaacatcgggtcggtcttgatccgtcgaccgcgatcagtcagcgtgcgcacggccaatctgagcacatcggccagacaggttcctgtcggttccctgctctatggtcagcgaccagcgactccgctttcccacatggccgcgctgatatgagctgatcgacatttgtctatagtccctgcatcggagaataaattcttgcaaaagtcgctctcctcgaactcttcaaccatagtctacgacttggaagactcggtgcatacctcggccaaggacgatgctcgcaaaaggctatctcagttcctgcaagattatccctccgatcttcccagtcgctcgctcaatggtctatcattagcggtccgaccgaacaacccattcacaggtcaggaggatgcagtggcgtcgactgggtcgatacagggggatctgcatgctggaggtcaagcagatgtcaagtcgatatggggagagacgacaccgaaggcaatcagcggcggagcggggccgatgatgttgatgccaaaggtaagaaggtatggatcacacggcatatacatccggctgaccaagattcatctcaggtcgaaagtgctagtatgctggatgtccttgatggaatggttcacagtccgagtcatggtaccagtcagtcgttgtgaccgagtcgagccatacgaaccgtctcattcagatggctgtcgtatcatagagaagactcccttgatcgcttccatcgagtcacccggcgcgatgatgagactgggggagatcgcttcatggcgtggacagaggctggaattggtcgggctgcttgtgaggttgcctagttccatcacttgcaacctagatgctgattatgctctctcatactacagttcgcagctgaagattgtgagcatgtcaaacatgtcgtgtacgcggatagtgctgatacgggactcacttttagactgtgcttcgtctggcatcatccggacccggtctagaatggaattactgcacgctcgttcgtccgtcgtcaccgcagccaaggcttatagcctgtccgccatcgacatggtgagttgaatcagatcggactgagccgtcatgatccggtaggagttgatcaagttcctctcgtgtaaaggtatgcgtcgactacaaggacctaagcatacttggggaagagtccgaggagggccgaaggttgggattcacagcaaaggtgagtgacgacgcgtggcccggatcgggaccgctgagctaacgtcggatctttagcaagcaatccatcccagtcaagtcgagaccatcctgaacgcttatgctccttctcagaagggtaaatcgaccaatctcttttgtctgacttgatttcgcttacctggctgcattccctagacatcgcccgggcacaacagattctcagcatcatgtcatcatctaaacgtggggccgaaggattgaagggcgatgatgggcgtgaagaaatgattgaccgcccgatggtcctccaggtacgccccagaccttcagacaacatattgtcgactgaactttgctcatcccaggccaagcacacaatccgcgaagcgacagccgctggacggctccgacttggggccacatcgggatctcgggcttacagcacggatcggccacctgcagcactcaagagttgtcccaactgtggacaagcacttccgttgcaagtaaccccatgcactgcatgccgaactccctgtcccttgccttcaaacatcctgcatcatgcacttttcgacttgatcccggaagctagcatgtcaagaccggctaaggaggtgttggaggaattacctggaggcggtttcgatatcgatccacgcggaatcagaatggtctttctcaagaaacagcagcggatacatccggacagcttcagcggagcaggagaggtacgttcgtacagtcgaccgtcatggttgcttctgacgaataggctctgcttggtcactcctttattagaaggaacacgctttggcaattgatcagtcctcacagttcaacaaggcatacactacgctcgctaaccctcttagtcgagcgaagtatctggtaagtcgcagccgctgtatcgccagcgcacgcaccagatcgtacagaggctcatttctggactcacagctcgatcaacatggctatgatatttccgagtccgattctctgaccgacccggatctactcatggaggtgatggaggcgcgggaagagttggaggacgcttcgacgcaagaggaatgcgatgcggtgcgggaatccaaccgaggtgagcaggctggcgcttttgggaaagactatcatatcttgccctttgctgatgacgcttgaggtaccgttggacaggcaaatccgagcaagtcgtgaagcagctactggaagtcttcagctcgagcccggttgacctcgacagggcgaagagcctcacgatagagctgcagtatctgcaaaacctagataatgcagcgaaagagtggcagccgggaaagagggtagagatcactcattgagatgtcgtcatcaggacgagtagacgaactgtatcttattcatcggccctgcacactactcaatgggcaacggcgatgggatctcgtcggaagcaattctgcgattccttcttcgtttgcttccgaaccgagtacaatcactagcttgtatcctcaactgcaggagagtaccaactctgtccatcctacgacctacacgttcttcccatgccccgaaccagacgggacacgaaccgccaatcgtggatcagaccgccatgaaacactgagaccggggggactgaccgatccgattcaatcccttctcccttttcatcgctcctggatgccactctgagcgggcagatggacggacctttcttcttcgttggcaagacacgcatctcgagggcgggcgaatactgtctgtgctccaagatcctctgaagcggacgaaatcctacttgggacgacgacaatggttacgacaacttccacgaaccccactacgacgccgataacgaccatgccaacgagccgcacacccaggcctgaaccttggcctgcacctacacctacacctatatctcgacgcccgtttctacgttacttttcccttgaaaccctagcccgcgggttctacgccttctcagccgggtgcatctcgttggctctttactgcatcgtcgggctcgtctaccctccagctggacctcgatctcgatctatactcgggacgcgcttctcggggatcgacatgaacccagatttgaacgccggtttggacgtcggcggtatgacaagaccctggatcgtgggtacgagcagggttggctacggggaagggtattaccggtacctcttccccctgttgatccctacctgtgcgtggttcgccatcgcccattggattgggtgggagttttaccgcaactccgaagaggattcgaaagcgtgatgagactggccgcggtcgtgcggaaaggggattgcggcggtgctcaggggggcggggcgggggagtgcgattgagtagatcgtggttgtacgtacgggtacatcctctggtcatggtcacggtcacggtcatggtcatggtacgcggtgtacgatggtcatcgtcgtcgtcatgggcttggctttggctacatacgtcctcggtcggggatcgtcgatcgtgatggtcactcacctacatactctgcatgtacttttgccccggcgtaataccgaccggttctcatacacataggttccgtgacactgtacgacccgtgaccatggctgaggtagctggcggccgtgcaatgggaccttcgtggtctctcctctagaaaaaccttttcgatagcaggataacgagcgatagactcgccaagaccattcgaagcgcgtacgtaacttaacgagacgacgacggcgcgaggctgtgttgggaagcgggcgggcggcggcgctctccccctctctcccctctctcctccctcactcgccgctgcttgtcgccctccacctcgcagctgcctgcggagatttcaatcatccaagtggtagtccggtatagagtagagtgagtggtggtggtgtagtttcaagaggcaacccttgaccgtttgagacacggacagagtcgcccagcacatataccccctcgatcacccaccacgatctgttcaaaaatctgcaagactcgccggtagagtcgatcgattcgataccctcccctttcaagtcacgcgcgatctcttcacggacgttcatcaacaaaccaggtaatcgtaccctgctagcatctcagtcagtagtacgcagggatcaaaggagaatcatccgatcggacattacgccagaccaaggaggtcttgcgacatctgaaacatcgggaggaaaggcggcaagcacgcaagcacttaggccatcatcaagacctcgtcgtcgatacagagatatcgtctgtacgactacgcgctcttcctctgcgcgaactcgagacctaggtcatccatacccgggctggaataatcgacccgacctcatatacccgatcctatccgactctcacctcgcaactccccaaactcacactcgccaatgcccgcctctcccttttcccggatatcgttcgtctgggcactctttctcgtcctcgccatactcggtagcgtacgggaagtggcaggttagtccctcgaggttctttctgatgcatgatcgtaggatcgatcgaagttgatgttcttgcctggttctcatccttgacgttgtcactcatcatcccgaccccgtctcctcgtctccttctccttttcacccctcgtcgcagcctccagccgcgcaccaggaccgctcaaacggatctttcacccgcgagacatctcgctcgacgtcctcccccgttcgatccccagtcatccaggtcatccactcaaaaaccgtaaaaggtcggacgtccccgattcgttattgttgccctcggacgggttgagattgtcgttgtccctgcccaacatcgatcgattgaaccgggcggtcgatggcgaccacgacgaggacggcgacgaggatgaccggattcatctccacctgagtccgaccgaggatatgatccatcctcaagccaagataaattacctctcttcgtccggcgagatcatctcctctgaacccctctttgcgcacgatcgagcgcatcgactctattccggggaagtcatcgcccagggacataccgatcagcggttccaggaggataggatcgggaatggaggattgtggtacgaccctcgtcccagttcggcggctcagcgtggggtacgcgggtgggcgagtgtccacgtgtacgatgtcgacggtgacgaaggggtcgagtcgggtcgtcggcccaggttcggagggacgatcaatgtcgacggaagggtttggaacgtcatgactcgggaaaattatgaaaggcatcggacagagttggacccgatcgtcgtcgtacgggaggaggatgacgatgagaatggtgggctggtcatcttccttgaaggcgatcaccatcccaacccgagggacgctcatgcacacgcaaacgctcgggaagaggagacgtctacgggctgtggacacgatcggatcgagtggaacatggacaacgccacccacccggtccgacgaccccgagtggtcccgcagcaggcgactccctggtggagctcgtcccctgtcgattcatttcccgacctgttcgccgactttcagggctcccgaccgaacggaaacgagccacgacgacgaggccttgtcagacgggacgacgtacctacggggggcacgaccaacccgaataccaattatatcaactcgatcgggtcgacctcgggatgtccctcggagcaaagggtcgtctatgtcgggttcgctgcggattgtaattacgtcgggacgtatggaggtgccgaacaggcgaggacgcagatcttgaccaacatgaactcgtgagtcgcgcgtccggcccctccgttcctctcagacgaatcgcagcgcaagaagctgacccgtcttcctgccgtgcattctcagcgtctcaaacctctaccgacagacgttcaacatctcgttagggattatcgagctcaacgtcgtcaacgacacgtgcgcaacctcgtccgctggtggtctaccgtggaacgtcgaatgctcaaatacgatcaccctcaacgaacgattgtccttgttttcccaatggagaggatcttcggggacaccagacgccggattgtaccacttggctacggcatgtgcgactgataccgaaatcggagtcgcttggctcggtaccatctgtcagaccgggagtaatcagcagagtagcgggtatgttagcggaacgggcgtgagcgtagctacgaggtcggagtggagtttgatctcgcacgaaatggtgagcagatttccacctactcgacaagatcgttctagatagctgatttccttttcccggcgatagggtcataacttcggcgcgatccacgattgcacgagctcttgctcactttcgggctcttgctgtcccttttcaaccaattcgtgcgatgccggtcaacggtacatcatgaacccctcgacgtcgacgagcgacccgcaggtcaatttctcgccatgcagcgtgggcaacatttgttccctcatgcagcagaacgctctggattatagctgcgtggttgcaccgggggccaggaccgtgttgagcttgcagagctgtggaagtgagtcgacgaggcggtcgctgccgtgactgacgaggtggacgccatggctgatcgttcggtcgtcgtgccatttcaaagatgggatcttggaagacggcgaggattgtgatcccggatcgggcggttcttctccttgctgcgattcgtctagtcagtagccaagattcggtttgcgacactggggaatcgtcatactcacgccagtcttctcacgacccagcttgcaaatttatcaacggagccgtatgcgatcctgccactgatgcgtgctgcaccggtcagtgctcgtaagtcgatcttttcttaggaacgtcatagcaaaaagtccagccgatactcaccgcatcctgaatctccagatacgcctccaactcgaccttgtgtcgtgcatcggtcgatgagaattgtgattctcccgaatactgtaccggaacttcgcgaagctgtccttccgaccggaccgccgaagacgggaccggttgcggcaacggcctcgcttgtgctagcgggcagtgtacttccaatgatcgtgagtcgagaatctactgttctttcttgccaaaaccgacgctgattttaaaattccttcgctagtgcaatgccgaacggtcggagcatccaggaacttaacgcaggcttgcaatcaacgaggagacaaaagctgtgttgtctcctgccaggatcctcagtcatccaaccgttgtctcatcctgcagtcgcctctgatagatggatcgccgtgcggctacgggggtgagcctcctcgctagcacgatacgtttgggctacatcctgaccttgaatttcatcaggcaactgttataacggtacctgcagcagcggtagcgtcggttcgcaaatcagttcctggtacacccagaacaagaacatttcgattcccgtcaccgtcgtcggtggaatcatcgtcagtcacattcgtttcggaatcgcttcgagtcgcctgatactgattcatgatcgatttgatcagattttgctgatcctcttcgcaatcggaaggtgtatcgttcgaggctgctgtggtggcggtcgacgatcgcgtcaagctcatcgttcggccaaccggccaacttcatcgtcttcggctgcgcccatgacacaacatcagagaacgtcaacgggatacgctcccaatcatgcaccgcaatatgcacctccacccggaggttatccctacaatggacaatacggtcctggacaatcgttcgggaaccaagcaccatcttactacgggaacggttacgccggacctcaacagcccgcaccgattcaagccggaagggaacattacatcgatgatcggctgtataacggtcccaattaccggggacattaagcaggtgattgaacctgaggagaggagaggacttacctgagcgtttttgtatcacgatcactttatacccgcagcaagagaatcatgtatcgaatatcgcaattttgtatcttgacagaacgattgagtgcacggcatatactcaactcaaaagctttaatcagttgcgcctagtcaatctggcacgcgatatggcatattcgagtcactcccagtgatgatcgtaacacatctgtgggaagagaaaccgacgaaggtgaagagttggtgttctgctgggttattcaaatggtgcaggtgctcgtggttgaaaggttcccgtcgcgcgttagggcatattcgtcagaccggccagaccagcaatcaaacccatcgtcaacttctggtacaggctcttcccacctgcccctctggccctacaatcatccttctggcctgagacttttgcatcttgcatcttgctgcacataaattgttcaaaagagagcttcgggatgtctgggagcagcagcccaatccgtatgatgttgtcccacatggcaaatgcctatacaacccaggacgatctagggtttgccaaggcatttatcatttcgtatcgcgagggagaagcatggagtgagctcaagcgagagcttcaggatgtgagtaccaacaggacttcctggtgtacgaaatccttgacgccttttctcctgtccagcccggctacagaccgccatcgaccgccgacttgactgcgttgttctcacgggcacctcaggctctacatccctcgttggtgacgatgatactgctacacctggagtacgttcgtcatacagagtggtctgcgaaggccacgaaacaacaagccgagcaagaatggaagctattcgatgcggtctacacggaaggaaacaaagtctggcaagggagcccagagagtggctggctaggtcgagctatgaggaagatggcggagaatctcttgcatctggctttccgagtaagcagtcattccgcacttgtctacatgcctcctcaaactcctactcatattcgcacgaccgtctcgcagtcagcgaccctgtcgagagataaacgtttcaccgctccctccgtttcggtcgatcggatacgacggacatttcagatagccacaatctcggagtggtatgtaccgcccgaccttggttctgcttcaaataaccgaatctttgtcacatctcagctcgtcattagacgaccctacgccgaagagaggagatatgacgttcgccctaggcaacatctgttggaaagtctacgaccaagttcgtcggctgcgtactccgtcagtcagtctatcgtcaggagctaatgtgagcaacacaaacagctgcaaacgtatcggttgttagacaccatctcccagatgtactcgacgatccggccgtccccccaggcaaggctcaacgcaccttgtacgtcgcgagcagaagtcgtcgggtactggttctggtgcggtaagctgagactggcgaagggagatttgcgcgaggtgagtctcgcccgatgagtccacaactgaccccaggactgattcgacgagttgataggctcgggactgcctgaagacggcgttcgacatgtgccctgtcagcgctgccaaaaacctcaagtgagctagcaatccgggaagaagggctacgcaccaatactccttctcacctctcgcttcatgtctagggcgatcttcattcggctgctgacatgtcagattctgctgggctattttcctgcgccaatactgttgaatcacttcaacctacacgagcaatttgggccattgctgcaagctatcaaatggggagaccgagctcagtactatcagcatttcaacaagtggagcgaatggttcagacaacgaggcctctggttagttctgcgggagaagggtgaagtcctggtctggcgaagtctcttgcgaaatgcgtaagtggaccgacatgactacctagaattggggctgacttctgttattctcctagctatcggatacaccgcgagagtcaccctgaagatccgtctgcacgaagcaaatcgtgtccgacgtctgtcttcttggcagccatgagactatccttccagcagtgcggagagacaaacgttgatattacggatgtcattagcatcctggcgagtctcatcgatcaagtaggtttcttgctattttacagagtctctcacatcgcccctcaagctgacgatacactgcgccctctccatccagtcctacatcaaggggcacttgggctatatgcagaccatgttggttatgcgaaacgcaccagacatgcccgttgaatcggcatttcctcgcgtgagcggtgtccgagcccgaagagtgacggcggtcggcgggtgaggcggacctcaacgatgttgtctcggtagccgggatgtttgtatttacgacgtaacgaccatttaatgatgaatgcagcttgttgatttcgattgtccagtctagacggcgatccccgtctgctctaccgcttggcgtatctgttcgacgtccttctctggccgactggatggagcgaactcgtgaatggtccgcacgatgaggttgatgtgttccatgaatccgtttgtggccaacctcaaaagacgtacgctgaccgcagtgtaggtactgcatgataccgatatgcaggatcttgtgagccgtgccactagactggacgaagacggagtgactcacaccacgagaacgggtccttcaaccgtcatggtgcgctcgacaagatgggcgttgagttcccggtcgaccaagatggcacgcttggcgatggtagcatgagcttcgttgctaaaggggatccggatggtgctatgcgtctcgtcacgaatcaagatcagctagttcccttccaatccagcttgaccaggaaagcggtgggctcacgctgaatgccgtccggctgcagtcgtttctgccattttcgctcgtcacaaccgtactcgctttggaggtagatgcgtatagcccgtgggacagcatggtttaaattgtcgagcagagttgctaaaccttgtccacaaaatccggtggtccgtcagcccgtcatgaactgattcgcaatcaaatcaaaagagcgacgcgatcgagatcgcgcgcctggaaatggtagctagcaaagctagccatgttcatgtcgatgtcaagctggtagtttatcgcaacactaccccttgaatgtgcatcaatcggtattctcaatctactctgtgcctctctcatagtcagagtctcgttggggaccgcactttaaagcttgagatcgtgcatcgactttctgcaacttctttcggtcattcccgccgagtatcgtcagccaaaggtcacattcacgcccttagctcttaggaaccctcaaaagcatttgagatccgctcgcagaagattctcaaacaggaggatcgagtatctgggtcatatcagccggaatgcctcccaaatccactcgagctaaggctcctgtcaagcaagaagatattgtcgaaatcggtaggttcgcgcgagatgaaagccgaaagccgatcatcattagacgctgatgcgacccacggcctccatcagatgatagcagcgaagaggatgtcaagccgaccactcgcgtgtctagtaaacgagccagacaagcgacatcgtcggaagaagacctaaagcctgtcaagaagcggactgcgaccggaacggcgtctgcaggcagcaagaggagagctgcaacaaaggtcaaggacgacgaggatttcgaggtaagtcggttcatcagctttgtgtcaagcgtgaagtgactgtaaatatgtttgcttgcagatgaaggacgcatcatcggatgacgcaccgcaggtcgtcgatgtctcgtcggacgaggcgcctactagatccaaaaaggcggcaggtgcctctaaatcgaaaactactggcgagagcaaggtcgcaccgatgtacggtaaagtcagtctcgaggtctttgagtgagtctgcgtgttcgaccccgtccccaatcgccatcccgttgaaccaagcttttgcgtgccttcatctagctttcgccgtgctgaagctctggcaaaacacgaaggcgtcaaggcactttccatgcccaaggaatcgagatcggcgcttacagaatgtcacgtccttttcaccggaacgtttgtcaacgacaaggaagagctgaaagagctggtcgagaagcaaggcgggtcagtacatgcgcgaggacaagtcatttaacgggcgagaagattgccaactgaaagtcgcatcatacaatactgtaggatcgtggcctcaagaccggacgacaagacttcgtttgtcgtctccggcgatgatgttactgagagcaaactcgaatacatgcgcaagaagggtctacggaacatttcggagcaacagttgtttctcctcatccggtattgggcaaacgacaagatgtacgaagatatccctgaggccgcgcccaagtctgcaccgaaaaaaacccaagctagtccccagaagaaaaagccggttgagaaggataccgataaacccgcagcaaagaagcgaggtcctaccaaagaagaacgggctgccgagatcgccagtttattcaagtaagtaattgctcaaaggaaagaagaagcgaaatcgaattgatatatggttatatgtacacagcttcgccgaggctgccaaaaggcgggaaagggaaggcgttgatcagcttgagaaaccgcctggtctgcccaattgtctcgctggcttgacattggtcttcaccggagaattaagctcgatgagccgcgaggagtcgactgagatagccaaaaaactgggagcgtgagttgctcgtccgcagtccagcaatttggctgtcccttctgatgcgctagtattctctctcgctcacagcaaggtaacgacaagtgtgtcgggcaatactatctacgtcgtggttggagaaggggccggtcctagcaagctgaagaaaatcgatgacctgggagtgctacagatcagcgaagcccaattctatgacctgatcagatacaggccgtccggaggcaaactgacggagaagcagaaggaagtccaagagaaggccgagaagcagatgaaggaagatgcaaagagaatggaaagggaagagcaagcaacggaaaaggcccaggcccggaaggccgccgtagctggaagggaaggaattgcagcaaagtcagcttaccgaatttcgccaaggtctcgttagtctgcaagaaatcgctgacacttcgctgccacaggcaaggaccggcattaagtagtcaactttggaccaccaagtatgcacctaagaatctaaaggagatttgcggcaacaaaggtctggtcgagaagcttggaaattggttggaagcatggtgaggatcgtgcgcaacgcaacttgcactaccgcttcagctgatgtggagccgattttccaggcctaccaattacaagagcaactggaagaagcctgggaaagatggttcaggcagctttgccgctgttctcatcagcggtcctccaggaatcggaaagaccacctctgcgcacttggttgctaaactcaagggctacacccccattgagttgaacgcctccgatgctcgaagcaaaaagttgatccaggtgagtagagtcagcacgctgtgcagattaatcaaagctgacttgttcttgccagaacgctacaaacgtcgataatgcatctctcgacggatggtttgagaatggtggcattacggtgagacgacggtcttccttcgcgctccgatttctcacacggctgaacccaatctcgagcagaaagactctgctgcaggtatagacatcacatctcgatcatgcctgattatggacgaggtagatggcatgtctggaggtgacagaggaggtgttggagcaatgaacattctgatcaagaagacaagggtatgtaccttcgcatccagcagcagcagtgtgtgttaggcttccactgacttgatcgttcaagacagattccgatcattctcatttgcaatgacgctagttcgcccaagatgaaacctttggctactacgacatgggccatgaagttccgaaggtgggcaacactgaggtttccaaatcagatgattcggcattcatccagacctggtttcctagaccgactgcagcagaaatgcgagctcgtttgatgacgatcgccttcaagtatgtcgataaggcttaactaccacggtcatccactcatttattgctcaaccagggagggtttgaagctagagggatccgccttggacacattggtggaagccagtcaatcggatcttagacaggtcctgaacatgctctcgacgtggagattgtcgaagaaagccatgagtttcgaggacgggaagacgctgtacgttcatgattggcgtagctcgacgggattgctccttaattgccttttcccgcagcggcaaagaaagccagaaatacaccattcagactccgtttaccatcacacccgccctgattggtccctacgccttctccaagaccaaccgtcagacccttaacgataagctagacttgtatttccaagactttagcttcgtacctttattcattcaagtaagtacattaaaggcttataacggcgaatcttttcgcctgctgagtgatggcttcttgcaggaaaattatctcaaaaatctcccagccagagtcgataaaggcccaagtgccgaggctcagatgaagcgattggaatgtttcagcaaagcagcggacgctatctcggacggagatttgatcgaccgaatgatacatgggtgcgcacagggaattataacgttcgcagtagtcgtctcttacctatctcttctcgactgctagtcaagagcagcattggtctttgctaccagctcacggctttagctccaccatcagacccgcttactggatctatggcggaagtgctgaagctggatacaacccgatctcgtttcctgcgtaagttccacccacgccgccatatttcgagatcgatcctgaccagcatattacctttagctatttgggtcagaactcgaaacgccagaagttggcgaggatgctcggagatatccagatcaagatgcgtctgaaggtgtctggcagtcgcgatgaagtgcgccaagattacatgcctttgttggcctcaaagatcgttcttcccctcacaagaaaagacgaagccgcggttcgtagccttgctcttgtagcttcagcgtatccgggctcatccccttggctttatcaccttcaggaagcgccggaaagcatcatcccatacctcgacggatactacctcaacaaggaggactgggacgcgtttgtcgagctcggtgtgggcgaaatgaatgacaagacgatctctagcagaattccgcctgcgacgaaagcggcctttactcgagcgtgagtgcacaagctctgaaagccgaatggctacgttaaactgactccgccttgtgttgcacagatacaacaagacggaccatcctgttgcgttccacagaggtgaactgctcttcgctggaaagaagggcactgcacccagaccagacttggatgaagcattcggtgtgagtcgaaagagccctgcctgccatcgagtaccaggatttcttttacgttactcatacatcgactttaggatgatgacgacttccaagagacgggcggcgtcgcggatgatgacgatgccgaaccgcccgatcccaacgccgatcttgggaaggacaaattgatcaagatgccgaaagcgaagaaagcgaccaaagcgacaaccggcgatgtcaaacctccggcaaagcgtaagaagaaggaatgaatgaatgatccaatagggtcaaacttccattgtatccattgtgacgacctcgtctttgcgacacgaccttcaacttgtgcaaattcacactttgaaccctgatgagcgcctcgaattccgcgttgagacagaacccgtgtaggcgaaagtcgacctaaatcggctcttgtagggagattatgcatcataagaaacaatacccttaggccgatgccggccggtcttgcttggcaaccgtataggatcttctcactacgaagcaagaaaccaggcacgtcgcagcaaaacagaagaagatattaccgatgccgccgagtggtaatcgagccattgcgtcccgaacaggaaggaaaagcatgcccttgtaggtgaaacaatctcagtatcgctgacagatgagcccctgctatctcggtaaagagatcacttacaacgatgaaattggtcgaccaattcagagccagtcctaaggagcccgcagcagatgcagcctggcgcaacgcattcgtcagtatgcaaaccttcacgtcaagtccgttgtgcatacctcggatggcatcacatcgcctatcactacccatgtcacctgataaatgttccccgattagccatgcgctctacacatctccttgcgagaacttaccggccctagaccaatactaaagcctagaacaaaggcaattatcgatatagaactcggtatagcccaaccattgttcatagatatggccaaacaaaaggctgatatcgacatggcgccagctgaaacaaccagaagttgtttaggtttatatctctttgagtaaacagacggctttggttaaaggggattttttccagcttccgggtgctaaatcaattgctgaccttcaagagcaacgctgaagcgaaggtgactggcactttgaccgccgcaatcatcaacgcgatcgtttttgagctagttggaaagactgtcgacatgatctgtgttgaatagtacatcactagtcaagttcaacgggatcagcatgttttccattcttccagaattaagaatgtactgtacctgggctgattccacacacttgttgagccagctgcaccaggagaacagtatacactgtattgcaacgtttcaggtcacgtcgctgcagcgtgctccaggcctcagcttacaagcacgacgaagcgtgggttgagtagtattgagaagttcccatgcgctcaacatcgtgtgacgaggtttgaccaagggggcttctataccgaaacacttcagcgcattaagcatattacagtactgtcttacgcaccgtcatttgtcagaagagggtccgattctcgtgtgtcggaatcacggccgtcctttcttgcttgatgttgaagccatacatggctctctgccacaaacggactggccgccagtagtaaaagagacatcgtcgcgctgatcataggcaccaatctccaaacgaacggcttggaaagcggtatggccagagattgcgtaaggagtactcccataacgatgaaagactggttggcgattcctaagcggttcttgtaagcaggaggtgcgatttcagacaagaacaacggggttatcgttgttgcgacaccacagcctcctccgatgcacaacctgagacctcgaagtagagtgagtgtagacacggtatggtgagacttttcaaacacacctcgacagtacagcccacttcaagtcaggcgcgatagacaagacgacgctgcctagcaagacgagacctgatgaaatttgtagtgccgctcttcggccatacgtatcagcgatatggctagctcccaatgatgtgaagagtcctcctagtaaaaaggtagaagacactaccccgaattcgtatagctggtcgcataacaggaaaatcagaccgaatggacggcattccgggtcaatcgggcaggaccgacagtgacatccaggcaagctggaatagaatcgaaggttctacgctccggtgacgtataacggttttctcgaccgctacacattatggcaccctggatcccgttcagagcggtaatgtggtatccatgttgaagggtatgcatggcggaccaggcgactccggccaagacctgccttgataatccctgttgcgaaactgacatggtgattgtgatgcgagtccttgttcttgcaagcttgcgctagtccgacgtgtccatcgagaatcctccggaagtgtttgcggcgagcacggtagagtcagacttatgatcatgcatgtcggcagtcaagctgtaatccacgagcgagcctcaactatcttgtttgattgcccaacttgcgatcgcgtattgatccccggaccggacatagccgatctagctgacgtaagccaaggagccggcgggatcatgttggcttgaagatccgctccgaaatgcaatgctgcatatgccattgaggcttccgaagcgttagcccaaacgatcacgctggcataatatacacgatgcagatagttgaacaggtttgcacagtcttgagacgtctatgagggcggtggcagtacagagtagaatggcaagcacgcgaaactccaggatgagaagaacaaggtctgccgttaagatggaaacgtattaggcgaaagtcgtgggcccaaagtcgaaatgttgaggatcgcggggaaggagtctgatcggttggatggaagaggacgtcaatagggttcaaggcgcgctcggggtgacgaagtttgggatatgatggctagaatcgcaggtatgtcaagctgtggctgcttcttcgttggtggagtttccggcggcagcagcgacttccgcgtcctcttctgcctgggccagtctatgcaattcgtcaatctccgccggtacgaggatgttgtccagccaaggatgatcgatcagatccctggcccgagctcgctcgttgatgtcgtacttgagctaagatacgacacataggctggaatcagtttgcagtcttcaacacatctccatctgtaatcgggctaaccattggcatcaaaaagtcggccagagtctcggcttcacgaggatcgagtagatatttatccgtcaagacttcccggataccccaatagcgcaacttctggatgtttcgcagagtgcctcttcgcgtaaagatctcgttgctgtattttccgccaagagcgagatctatgtagtgtgtgggcgtctggtaagcagtctaggactgccgagagatagagatggaactcacgacgtggcatctcgcccagcagctcgatcacctgagccatgtgatcctcatctttcgagtaccgactgctgctttctgcgacgtttgattgttcaagataaggaaacgcacccagctttaccgccagtgaagaatgacttacgaggatcaaagaggtaatcaccgctgagcagctcgaacgtcaaacaagccatcgaccagcagtccgcccggtcgttccacttgttgccaagaatgacttcaggacaccggtactgcctggtctgaatgtcgttggtgaagtgatgatcgacgtagcacgcattcccgagatcggcgattttcacttcgatctatcgagcaaaagacgcttgaaaagggtcagttaggacaggcaaggagcatacagccacagacgcaccatttgtagggtatcggggtcatagggtgccgggggtggtaatgttgtcgggtcgttgaccatgacagaggagtggggttgttgttgaaggggattataaggtggtgcgctcgaaccagaaggggcgccggcatcagaggattcgacctcgccggaagtaggcggtagtttggcgaatgaaggagcagtaggggtatcgcctgcagaggggaaggatgaaggtgatttcgagtcggatcgagcggcggaaccgttcgttccgagatctgatgactctttgtgacccacgccaggccgtgaaggagaacccttgctcgggctcggtgtcgtattgtgtccaagttgttgagacaacaatgacggtcccatctttttcgctgggatggcccggttcttctgcccaaagctagaatccccaggactaccctccttgagcttgacattgcccaacccgttcttgatcgagtccgccgatgatccggacctccccgtcccgggtgcgctcgacgatggccccgacgcagtggcggccgccgacgatgacgtcaacatcgattgagccagcaagctcttgccaagactacctgccgccgaaatcttgctcatcccgaatccgtacttgtccagcatcgggctagatccgtaactgctactcgggctgggcaggggctgagatccggtgatgaagatgccttccctcctcggcgtctgggttccgcctcgaccctgactgggtggtacgcctacaatctttgtaggtaccgcggccggacacgttgccagttccgctgcgacgacagcctcgacgtcctcgatacagatcaagacgttttccggcttcaaatcggtgtgaatgatcccgcattccgtatgcaggtaatccagcccgagcaagacttgtttcgtgatttgcttgacaatgtgcgcggggacacctcggtgctggtaacgtttgatgaggcccaacaagttttctcccaacacttcaaacaccatgcagacgtgggatccgttgggcccgacgtgtcgaaagtcatcaagcagctgcactgtatgccgtcgtccagggtgattagggttcgaagtgacaagcttttgaagaagctgaatctcgtcgagcgccgtctcggtataatgaccgtccgatttgacgaccttcagcgcgacgtgcttgttgatactggagggcgtgacgggtgcaggatacaggcagcaggtgaatggtcagcgcgacacgcctcgaccggtttggtgtgtcatggccagagccgaccagaacctctactcacgtcgtatctctggccaaccagacggtactgaaatgaccccatcccaacttccgcacgattatgtaacgtccatccttgaatgcgtctccaatatgcaccgggtgataacctcccggtcgataatcctctagatcctcctcgtcctcagtcaatacgctgggttgtgccgacgacgctgacgtgcccgagatggtggaagtcatggaggaggggtcgacatcgaggtggttatgcgtatgggtatgagaggtcgagacgggaagaggcatgggagcgacggtaggggtggttgtctgagaggtttggatgggacggggagggatggtgctgttctgtgatgtgtgctaagaagcgggtcgcacaaaaggggtcaaggtaaaggggtagcgggaggctcagttgtgtccaggtccaactgtcaacacgagctcttaaaatggctcaccttcattgacacggcgagaggaggcatggtttcggaattgagagcctaggtggtggtcctggtgatgatgtgagatggtcctaaggatcctgcggcaaaaggcgagagcgcctgtcctgttcacctcgatcgaggtataccgcgattcgagcctaaggtctcggtttcctccagatcgacacggtcactatgatttcctcctctactgatgttagacggcaagtgtgattggcagggtgacgaaactgaaggatcaggacgaagtaggtcgtatgggttgaaagaggtcgcgtcgtgcgagatgagatatacgtgaagtgacgagatgaagatggcgccgattcccgctgcttgtgacgtcgtccctgagttaatttcgtggcgaatgatctgatggtgatgaggtggatacagggctatgtgtggaatcgctccttgctgatgccgtgttcgagaagagtgccgggccgagtgactgggagagctggtggtcttcggcgtgtcgagtggtcgggcgtgaatcagcgggcttgctgctgaacgagccaagagcgagaggggtagtgtttcgtttcggatgtacagtgtacagtacaaggtcacacgcagcactccgtaatctacctactgcatgtactagcagatagctggtcgatgatgaatgatagcagtggtggatgtgtgagttcgaggtggccgcgggaggcaggaaggcaagggaggggggggggtagattgtggtgcgggatgatgataacggagcgcctcccctgagtggaggggcagcgtatagcgtaagacggatatcgctcgctcgatactgtccgagatttcttctgggttccgccgcgagtggctctcgcgtcacagccacgagacagacaaggcagtcgtcaacaaggcgggagagagagagataaggggccggcggtattgaaagacccagctttactaattcccagcatgggctgccactcccattgtggctcatgcagcggaactgagccacgcgcccggttcgtcacgagccacccgggccttgatctcgtggaaatcatcacacgacgcgccgaatctaccgagctctcctatcgcatgaacccggcgtcgagacctcttcgtcatcaagtacattgacctcgatcgacctcgcagttcaagctggcttgccaagatcacatgtccggcagggaccggaacagattgacgagatctgcagctgcttccttcgtcaaacgaaacgcggaagtccccactccgcctcctacccccgccgcggcgcgcgttaccaagttcgggctttcttcgcttttgatcggatatttcagacgatcgccattggtcgccgtcccaacgccgcttgggcgtcaatcttccgacccacccatttcatcgaaaacgcccaaaccttgctacctccgcctactcactcgccctgactcccggccgggctctcgtgcacatggccatgacacgacggtcagtcgtagatctcgtctattttcattcctcgacctttcaacttgttgctcgcgtctctcggccgaacacgggatcgacagcgatggctgttatccgggaccaaaacaagaatgaagcgagaccggtccgaatcctggctcgtcggttgctcggtagatagggggcaacttgctcactcgcactcgggtgctattcgggaaatcgtttcagccagttgacaaatcgtttcgaagagaccgtgaattggtagccgagacttgagccagcaggtaaaagaggaccgacgggctgcattgagccaaggcttccttcgagctttgtcagtggcatgtaccgtccttagcgactctcttcagcacgaaagatgcgtcgagtgtttacctgttgaatgacgatctcttgagcgtaggatcccctttcgactggaaaaatagagctctacaacctgctggcaacggcaacgtcgccctcagctcgatgttgtatggcctctcgctcatcgaccgcaatcacaatgctaagcagggtacagcatatcttgaagcaactctcggcattctgacatcgtggatcgatgcgtcagggctggcagcctatagtgccacttgtaacacgataggccttaacacgcaacacagcgacatccgtcaagaagtcttcagaacccgctttacctcgttctaatagaccgttcgaaaacggtgcgaatcaccactacgctttgaagaggcccatttcgtcgatgactttcacggcaactgacttcagaagggttgcgaggcttcacgaactcggctttgcgaggtccaagcaatgctgccgaaaacgaccgatcgtggcgcgatcctgccgactgcttcaggaacgctcaccatgcttccgccgcgtgtggctcttcctgctacatcgcattcctagttgatggcatagcttgccaacgacgtcacttgcagtgtcctcttatggacaaacaaccgctgtctttgtgaagtacctcaccgatcccatcctcgacgtaagtaccaatctagtgctggacaggctcaagcgtccgctgtatgcaatgcccgattatctcttgccagaggtcagaatttgtgcggtactgatgagttaatgcgaatggtagtgaattattacacagacatttcgcgaacattcagtggacgaaatgtcaatgtctccgttcacacaacgaccaattctcatagctactctttttctgtctgtgtccaacctcatgctcatgtttgatcattcttcgggcatcgggaagctctgaatccatctgtactagtacttgtttactcaagatgagtgcgtgacgatcgcggcttcggggttgcggactgatccgggaggcccgagcacgcgaaaggccgcgtttcatgtggtgtccgcagcctactgtctcggctgtccggtctgcctttcgatgagaccaaaggaagtcttcgacgcgcgtgtaccgatcaagtggggcttgaaaccagttagagcctgatccccaggccatgctgtgtcgccatggaagctaaggcatatgtgcacgcgatcagcctgtatgagcttaaaggagggttggttccaaaggaacccttcggtgaaaagacaattcacggaccgggaccggcttgatccgaacaagggaaactctaaaatcgtaaagatgttgatgaatcacgaaaagtaattctttcgttctgtcactcgcaccacttgatcaaagtcagcccgaatcgatgcttaaggccaagcaacatcgccctcgcgcaaccctattgcctctttcagattccatgtgccaatcatctttagcagcaaagacgtcattgacagccaccttcggtccgtttgatgttacccgtcaacatcgtatacatacggtgatcgtctatcaaaggacttgcttctcccgatcaaagggttgcaacgggacattttcgaagcagaatttactcctctagctagacttgcgtctcttgtcaaggcttcattatcactacccacactaatttgcaccactgaacgatgtggtggcctacccaacttctgaaaagcagcatctcttcgccgagctccgagtctcaccagactagcttcttcaaattggtcgacagtaacaaagacaggccgaagcatctcgacgcccctaaacagacggtccaaccttctctttcgatcgaggaggaattgcgtgaacccttatctggcctgctctgcgggaaacctttcgtcttgcagatgcgtaacatctctagaaagaccaagaaagacatctccttagccctatcggatgacatcgaggaagacgtcctcgttatcggtcgcaccgcttcttttgagagaagccttatggagaaacgtcacgtcaccatcaaggggaacgcggtcgtccgcagatcgcttaccaagatggcttccacccaattcatgcggcctggttctttcctcagaaaagaacaaagttcgctaccttctcctacgtcgcggctcatcgttaccgatctggtgaacggcaaagaagaggattactttatgctagacctggacgaggcttggcatccggacggctacagcttggatacccgtaccgagtacctaacgcagctaacaagcatggccgagggaaaggtcactaacgagaaaagggcccgcccggttcaggccaggaggtctgcggtggccaagcaaaagcttgaagggggactgctggacacgttccctgtctcgccgactgatgatgcggacggagagcctgagatcttggtcacgatcaagaagcctcagcttgagaaagcgcggcgagaaatcaccgtatctatggatcttaatgaagccggcaaccacaactgtcgatcgtcgtctgggtcctcttcgccgagcagtgccacattgagctttgccggcaaacgacaaagcggcttcaaggggtccagtggagaggtgctacacttcgtcctcccggaagacgctatcgacacgtccgatgtgtatattcaccttgggccgacacctcgcggtgcaagcttcaaagatgccatcgaggggcaagagcgccaaaatgtggcggtaccgagatccaattcgacgtcttcaattccatcgccgaccagcgtagggtccttttcaggggaagggaggaaacgtcatagtaccatggacctcactgtcttagctacccatactgaagacgatgaaggctggttcaagctcgccaagagggagaacgaaagttgggcagacttttcgcagagcctgaatcggtcaaggggagctcagatctgggaaaagcttgcgggggctgagaaggttccactaccggaaccgagtctcattggcatcagtccttatcgccacaagagcaagctatgtgttcgcggagccgagtacaaaccttgcgaaagccctcctgacagcctgcgcgcctgcaacgagcctagatcgttgagccccgcaagtcataccatctcctactcgccatccctggaaaggctcacctgcggcaccctacccttcttgtacgagacccttcaggagaccccgttacccacgatgggcaccctgtccaatggacccggtcgcgtctacgcgcaggcgcaacctgtcccgaccaccactcatcccttcgcttcgatttttgcgtccgaggcctcgtaacatcgaagtcaccagtatttgcttagagacctgtacaagcacgaaaagattagattcagcccgcacaagtccggccccgtccggctaataccgctggaacaacttgctgcgattctatcgtcagctgggcaaacttgcaaggcacgtccgtgctggcctccggtacagccgattcaccgattgcaccgtgaggcggtcaattcttgcacatcgtaaattgattctcgatcagcgagatctccagagataaccgaattttgtttctcagtctttccctatgaatgaattgtacagacgaaatatacaaatgcaaaactcgatcactgaaacctgaatccgactttgaatctaaaaacgcgtcgcctcagagcaatcgaatcgagatgtcattcgcttagccggttggttggcttgttgggaccgctcgtatttcatcttcatagtcgcagcctgcatgtctgcgttgccatccggctgtctactctcctcgttggtaaaaagtacgccgcacgatcctatcaccatggccgaaatctctcagaaacgtaccagcgttggtcaaacaccacctgtagcacgcaaacccaagcgtgcgttcctgttagacgcggtgatgctaaaagtgaattgacgtctttcgttttatcttacagctgccaacggcctgatcacctcgtacctagtcgtctacaacaccgtatcgcttctctgttggggagtggtccttttcaagacggtctcgttcatcatcaaccgacctgccattcctcatctcgacaacaccaaagtcttgccgacaactgcctctgccaagctctcatcgctgctctctctaggagcgaccacgatccagcactcggtatcgcggtctcatggtactactgctgggattcccattcctcctaccgatctggtcagcaagctcaagacctacctcggcggatcttacgtatacgaggaactcggcccttgggtcgtcctgacccaaacaggagctttgttggaaatcgtacatgctttgctcggatgggtccgaagcagtgctttcaccgtcactatgcaagttgctagcaggatttggatggtgtggggaatcgtcgagaccaggccagaagtacgtaccgctcgttcggtacggcccgcaagcgctcaccttctgcgcgatctctagacccacttcaacccgctcttcactaccatggttctcgcctggtccgtaacggagtgtgtccgatatgcattctatgcctgtgctctcttcaaggtcgagcctcggatcttgacttggttgcggtgagcatgcggtcaagcatcatgatcgacgcaatcgaagctaataattggtacatgcgatttgcagatacaacaccttctacatcttgtacccccttggagccgggtccgaggctttcttgatgttctccacgttgcccaccttgaagacgctcgttccatctatcaagtccgttttgagctacagcagaaagggcaaggtgtcggtctggctgaaggccctgtccggaaggaaagccggtcaaccttggggcgcttacgactttttgatcttggcgcttttcaccatgtggtggcctggtatgtactgttggactcgactgtctcgacacattgccttcgctgatctcacgtcgatgcgtctcagccctttacgtgctgtacacccacatgatcaagttgcgaaggaaggtttacggcaagggtggaaagcaaatcggaagcgcgcccaaggctcgtcgataaggaccgccgatcaaataatacagatactatcaagcaagatacaagaatcgtagcataagatacgtgtctatatcttctatgcagagttgcgttgcgatcaatcattgcacgcactatacggctccgacgatcgacttggcccagactcgaagcccaaccctaccgtcctcgtgcgcagggaagcgagcgacgtctctgttctccgtgccgtgtcagtcgagaggatagaacgaatgcggtaatctcgacgacgcacctgacaacaatcgtcgcatgcgagttatatgcatacggataccctgcgagcaggtaggatacaagttaaagtccagcgtccgaatgacactgccatttgagactcacagactacgatcctctcgagctgtgggagagattgattgaagttccggatcatcgtcttttgtgaatcggtcaggagcaacttcgccgctttccctcgaacaggaaagtcgtctccgttccaatcgccattgacctgttcatgtaggaattccccggcgcgcgttacaccttgattcactgcacatacggcttttgagtcagtttccgcagcgaaatcagcttggctgcgcaaacgcaccggactgcgagatcctgactgcaaggccattccgacttgagcgataccgcctgatacgcttgctcctatcggtcgaccgagacgtcagtgagaaagatgacgcgttgtaacgtagggccattgctcacgatctgaatctctgcaccgtaagtgtgacgaagctgcaaataagatttgcgcttagtcacgtcctgcggtcttttgaaaagagagtcactcacgctgagactacgaagaaagtgacaaatatgggaatcagggggatggctagctgttggacgagtcgaaaggtcagtctcccagccccgctagactcggttgcatgcataactactcacgtaattgaaggggaatcggaattcgaggaaaggcggtcgactcggtcgtttacgtagcgccttttgtcccgatctggatttgactagagtatccgtctcttcctctccttctgcttctgcctcgggcgatgcgaatgaccaggatttaaccacgctattctcatcagtcttgaccctgatgccagttgtttcaaagctgtcgaacgggtccgtctcggtgatggccgcagtcggataagacacggtcaagtcatggcatctatggtgcccaatagcagtgcgtggtgtgagttttctcaggggttcagaagggaacgagactttgctgcactgcatcgactgacccgttggcgatgatctgaaccttgggaaatttccttagtgtttgcataaaaggtcgggctgacaaggcatcttcaaatcagcaaactattcggttctcatcaacgaaaaaagacctactcggatcactcatgacttccagtagcgatctcggatcctgctcgctgaaatggtcccaggcgaaaagctcggcacccgtctgagaaaacatgtgtcccccgacgagatgctttatcgtcgaaaacttggtacctacgtgcatacacgaagaatgttagctacgacagaccccatttgctgcgagaatagtactgaccatatcgtggcatgccaaggttctagcatcagacaatacaagccagatcagcatcggagccgaattcgactacgccacacctggacgtacgggagttgcaatagtagagaaatgaaccggtttgcatttgtcaaaaaacgaaggcatccttgagtccagtagagcgatcaggtagcgggcgattactgcagggtaccggaaaactgggtaagcttagggcttggcttggaactcgacatcatctgcttacaaccaccaagcgaatatcccatctgacatgatgatatgtcggcgtcatcttttcatgcgtatttcaacgacttgctgcagccgaagatactgactatactgatggcttttacgtcgcctccttgactcgatattctttcgatcttggcatccagttcgtcagcgaccctgatcgctagcaattccactccatcgaaagtgagcgttccaggaaaggtggaagggatgaaaacttctaaatcgagatcctcgccatctgtctgtttcgtttgagatcgcttctcttggtgagccttgactagctcgatctcgcattgagcgaggttgccggggtttccgtgcagaccgtgtatgaggacagctagatgaacgttgcgcatattgcaatatggagagatatgatttcttgcggcttgtagcggattattgagcaggagctggcggctggcagctgatatgaggatcctggtagatatatagtagtcaaacgatcgaccgtcgttgctcataatttatcatcatgctacatctacgatgaagcgtcgttcggcatcatcgtactcgtacgtgagtgcacggcatcgggccccgagttttacttccgacaccgatccccgacgggcatgacgatcgtcagacgtacggccaatggggtatgtcacgggcaaagttacagatacaagggctcaatacaaccctgagaattgatcaagtacatgccgaaatcactgtagaggagggagcgtgtgaaagtctagaatcatcgttgaaaaggggttcgtatccggggatcatcgatcgcttttgcgggcagttgtcgtcgggcgtcttctattcgtcttgcttcttggccgccgcgtaccgtcgccatcgctcgagctcgtcaagcaaacgctgcaaccgctgctgcttctcatcgtgaaccgtacctcgaaggaattggaaaggcagatgttcgatggccgatttcgtattcgtgcacgccggttgcggcacgtcggaccagtacttgacggcagctttgggatcgaaccctgcgtacgccaatagcctgataagggtccgactgtcagcattatgcctgattgacgaaaatatagcctcggacttgcctcaggctgaccacatcggcctctcgctcttgcttgacggaaaagtgaatgtccgaataggccgtcgtctcctctgcctttttcttggttatttgactaatagcatcgttcgcaaacggtcccaagaagaatctagagtcgagaccaacgcgtgaatacgagctgccgtcgatccatccaaagaaaacgcaacctcgatcccgactcacgtgatagggtacaggatggtcctgatcagatcgcttcccagtccggtagcacccggaatgacaatctcgctccaactaagactttccaggtgatgactgagaaccagatgcgacaactcgtgtgcgagtacaagggctagctgtagggtctgttcttccgtcggttctggagtataggacgtcgagacgttgttaaccgaagggttgggcggatgcgagccggaagaagagcgtccgaagaatgattcccagatactggctgctggcttcgccacagggatagcattctgtctgagttcgcgctgcttcgcctcttgttcgtcctgcgccgaagacaagatctcgtccaagatccccgtgtaaaccacgacacccccacttcctccctctccaaagccatagctcatggcgttcctctcctcgttgtcgagcaacaacaatgcgtatggtggtccaacggcgatgtgatgatccgcttctttaccctcgagcgcaccatgcagcaccgccgatcctcgcgacctcggatgaagaggatggtccggaggtggaggcggcaagagatccctcgcccatttaggtccaatgtcactaaaggcttctgcaatgtctcttccctctcgttccgctcgacaatgttcctccaggccccgttccaaacgcctcaacacgccgttgacccagttccatctccaatccgccatcggcacgacgggaggtgccggactctcggctgtggtgaacatgctcagcacggtcctgtaccaaccgggccctctgagcttgtcggtgagcccttcttcctcctccggtgacaacatgatcaacctgaatctacccgtaaatgggaccctttcgaggctgaacgcggcgacgacgacaaacatgactatcggcaaccagatcaaggtccagatgaaccatttccctcgttgcacgtgccgaccgaacaccttctccttggcaaaccatcttcggagctcgtacagcttttccctttcgggtatggacatctcctcgatctgcctcatggcccccgccgaaggttgagggaggtaaaacatggtccatcgtttccagggtttatgaccggcgtcaatcgtctcggacgtcttgcctaatccggtccgttctcgcgagaggttgatcgtccatgcgatgacttcattgtagatctcggcccgggtagccaccgacttaaactcgtacgtggtcagttcctgcccaaacttgttggtcggccccgtcgtcttcagagattcttgtccccaaggcggccaactccccatcttcagcgtagtcttactcttgaccagcctgccgaacgaccaccatggacattggtcccgaacccgaatgatggctggcgagtcgatttctttccaactccgacaatcaggctcgacaggtacttcttccgacaattcccgttcgtaaaactcggcaatatggggcggagtctgcagtcggacgaaatgtgcggcgtgccatttccgattgagtttcgtcctgatcgtcttcatggcggcaaacgggaggagagtgaggaggagccgcgagatggcggctatacaggcgatggccgtcgaagactatcgaagcggtcatcatcgagcacaggtatagcacaatgttaagctgcgtcagtagtggtcctttctttcgcgttcatcaagtatgtgagccggatgcttggttctcaccttcaagagggccatggccccgaacgccatcgaagcaccagccaattctctcctcggtgtcgtcctaaaccctctcgtccccaacgcgtgcaaaacgctccctgtgttcacccacgtattgctgttatccaggaccggtcttctcaaatccgtccggctcgaaatcgtagcccgtctagttgacgagcgatagacactcgaagatggggttgataggggtcgaggtactaatcccaccggtcgacggcgaatgggcatgtcccgcatcgcattcgtggatgtggatagagaggcgttgtaaatagcgggacttgtagaatacgtcctcttccgagaactctcccctccatgattcgtggtcgacgtggaagtcatgacggaaaacgacaagctcgaaccagcacgcaaagatgacgtcgtcggagtgtgcgaatgagatatcctagccagttcttggccggaaaggcgacctgccgtaccgaattgcctggtccgcacgcgtacgtgcgccaaccaggggggacatgtacatctccccgtccgactcgtccttcctatcgctagcgacgtgttcaacattccggacgatcaaaggtaatttcgccaagttggcagaggtctgtgttgtgaggaatcgaggcttccggagcgatgcaggtgtgggggagttcctttatcagcggagattgggcatacttccccttttaactgtattcaaggtcgaattcccaggttgccggcaagagcctttctctgccttagaagcgaggtggcgatggccgtctttgaagtctaatcagctgctggatttcttgaggaggttgaaaggtaatgcgccttggacgtcaacaggctgcttgagatgcccgaacgagagtgactgagtggtcgggtggatcctcgcaattcctagtgatatgaacgtgggtgtcgaccgtttgactgcaggctcgaagaaggatgggcacaccaggggagaaaaaggtcgtgtcgtttctatcttgaggttgtgtgagagactgtgagcgggtctgggagatagctaaggggaggcttccggcttccggattcacatggcaacctcgattcggttgagaattgacttggtcgcacctctttgcacatgatcctctttcatccgagcatccgcatatcgctgtgtgtgaccgcgctaaaactctcctgtgctgctgagccgggcccctgagcttggtaagtgatccggcagcccggccggttcggcgggtggaggcaggcagtcagggcgcaggcgagaggagggaggcggaggcggagaaagggaaggaacgtcgtagaccgaagaccgaggttacgagaaccagacgattctcggatccgcgtcgcgacaggtcgactcgcgactcgaaatcctaaaaaaagaaaacagttcttggggatgagtctcggtttcacccgactttgcctgctatttccagatttttggcctcgtcgttcattgctttggtatctttatgatctcgttgcgtttgccgagaaagagaatgttgtagacctggtgagatagtgtttcaccgtcgcgcctgatgactctagtcgtactggtcaaaataatgccgtcccaccaagggcgtatttgggaactccaaaatcgcgaacgatcagcctagcaggacctgaacgtctcgtgcaaaagagcgacgggatctatgcatcgaggggattctatttcgcagcaaactcgctcgacaggggcgcgctacacaattgagcgtcgcaccggcctgatacactctccaaatctaggctcgaatgtcatcacagaccaaagaatcaccgtacgagatgcgccttgatcagcgtttcatccgtatgatgcggtgagttttcgcgacgcactgctagtttgtgcgcgtgtgctcgggtgtatgagtacctgtacaagaagagatcggcgggcaaagttcactgcgactagaccaacgtgatccgtgtaatcgaagcgctagaactcttgctaaggattagcgtttctcatagcatgctgctttgcgatggacggaggtggtgctgccgaaatatcacatcgaggatgcgaacggcttcactatttcaccctagtcgtccaaacatgtatcattcatacgcgcaacaaccgtgcaagtggccagtcgtacccgatatcacacatagggaatggtcgttagacatttccggggaggactccgccgacgatcgccgtacctagtgcttcggtaaagggtgcaagagaagtaacgaagttgatcgtgatccctctctggccgccagtctcttttacgaccgaatccagtccgaccaaggggatgcggaccagcccccaaggtagccgagtttagtaatccgaactgcaacggtgaccacagctagtccacggtccgtcagacggaccatttcacacgacgttgggatgacatggtcgccgtgcccaagtgggccgaggtgccctttcctcacgggggcaaccgggtggtaatcaccgtgctgcaagtcgaccgacatggatacaacaaaaatggccgtgcggatcatcaattggcctctgggaacaggaacctattgcgactgacaaactccccgaacaatacgcttgaggactttgaggactcaagcgtcgatattgcatgtcacagagcgaacccaggcatgacctcgcaaagcgaatagtttgctcaaataccctttgctcgtctggcaagggcgctgaaaaaggtacgatagctctcactttctgcgacatcagggtcgcaaccttgtctgaatctaggtcaagaaccttcgcgaagccgggagaaggagtttgaggctagtggagctgtatgagtcagtgtgtgcgtgggattccaaacggtcacgaagttcatcttcactcgatgtaacggaagacctatgctgtgcgctagacttgaaccgagaggaaatcgcatgcaaatcgtgactctacgtagacaagatggaaaggggtcgtaacctgggtgtcggctggctttttgtgtatctttcggctcgctgcttggtcctctacatctcgggcatctctccctctccttctccgcccatggtctgtacctggccaccgccaccgccttcttctggtcctgttaatagcaagcaagcttagagtcagcatagcgagcggagcaaaagaatatccaagctcgtcagtgtcggacttacgcttcgcgcttacgatgtcgtctactcgcaacaacagcttggcagactatggatgggacgagagaatcagttccacaattcccatcgaatcccacgaaacgcaactcacctcgatggcagtcttcaaagtctgaatcttgacagcggcggactccaagagaccatactccttcatgtcgacgaccttgccggtctcgccatcgacaccaaagtggttgtctccgttcgcgtgcttggcctatgacacatgacgacgaaaattcacgatcagatacggctgagcactgaagcgaataatcatcaggagctcaccctcaactcggtcaataccctgatagcgttgcctccacagttctggaccaaagtcctaggaatgacttccaaagcgtccgctacggccctgaaaggtgctccctcgacgccctccatcgccttgccctttttggcaagcgcaacgctgatggccatctcggtcgctccaccacctggagcgagggtagggttgaatacgacgttcctggcaaccgacatggcgtcggctaagtttcggtcgatctcgttcaagatgtccttggacggtcctcgaaggaggatggtgcaggccttgggcgacttgcactcggtcaaaaaggtaaagtatctatagaatagagttgaatgccaaacccattagcccgacatttacgcaaattcgtaacagtagctaggactcactcgtctccgagcttctcaatgtggaagagaccgcagtccgttccgacgtccgattccctcaagtcctcgaccctgttgacaatggtggcaccaacggctcgggcaatcctgttgttgtccgatttcctgactcgtcggatagccgtgatggggggatcggccttgaggaggtaatgctgagcgaggtccgaaacacccttttcggtaaagacgacatcaggcttgaactcgatgatcttgtcgcagagagccttgatctgctcctcctcgatctgaaggtaacggttccagtcctcctcctttgagacctcgatgttggtctgcgactctcccttcttgtactccatggggcagtcgagcagaatgactcgagggttctcaatcctcctcctcatcttggggtgggtaacgtctttgttgaccatgacaccgttcaggaccttcgagtcctcgatctctccaccggggattttctctactcgggcgtatcgcttgatgtcgaccgtcttgactccggtggatgacgaagattcaccctcggcggtctcggccacagtcctcacagccttgagggcgagagagcacatcaggtcggaccatcgggatgaaaacttggttccgatcgaggtcttgatcagggccatcatctctttttcggacgacgtgtcgacgggtaccgagatcgactcgatggttgccaaagccgagtcgagaacgcttgaaaaggccttgatgatgacaacggggtggatgttacgttcaagcagaggcaacgagtgggcaaggatctctccggctgagaaaagcaggacgaggcgatgcttgcatcagcgaatacaggacttatcgacgagagagagagagacctgctcaccaaggatgataacactcgtggtcccgtccccgacctcctcatcctgcgttctcgacaactcgatcatcgacttggcggcagggtgtgctacatcaatctctcgaagaattgcgtgtccatcgttggtgagtctatccatagacacaacacgtgtaagtatggtgaatggaatatcaatgacttcgtctgcactgacaagattcctcccatggggtccaagatcatcttcaacatggccttgggtccgagacaggtccggatcacatctgctacagtctgaacatccgtttcgtagcggtacctcggtcagcaacgggcgacatgagagaccgagttcgaacactgaccttggcggccataatgttggcagactgcgcttttcgtccggtttgcctttcgggaccggtgtctgtgcgtggttgacaattgcagtatttcaggtatatgtgtcgcaagcaactttggcattggactcactcatgaccatgacattaggttgagccatcgttgcaggtactgtttctggcttttcgtcttgtttggtatcctctctacagtcaaggatcggtgttttcgagcaagtcaaagatcgaagactgatacgaacctgttgatctctgggatcttgttgcatattctcgaccagaatgatccatgagccggggaagaagtgtgtgtctgttcaaacagagcgcgaacaagacgaaactgacatttctcgcgttctcgtcatatcgtatcgatcgaaatgttaggctcgcctcgtagcgaagccgcatgttacgggaacctgcatggatgatgatgatgatatgaggtcgagttggaaacaacagcagaagcaacctgcactccgattcgacacctcgactgaccacgataggtgaaggccaggaactgatcttatagacgtttctatcggtcgttcgccacggcttctttccaaatacaactttgactgctcgcacgcatcgacgtcacgccacatcgacctcagggctggatggccttctgaacgtgttcttaccaccgcaagtcattcttcgtgataccaaaacacatcgtaattcaattccacgtctggtctgagggaacctatacgcaacatggccgacgcatccacggatgaaacccgtctggccgactcgatcattgaaaaggtcgcgcaagaacaggcctaccaggaccttcaagaccggttgaagagcgtcgaggaagaatgccgtaaagaacgagcagagaaggacaagatcaagaccgagagggatgaactcggtacgtgtcggtaggcttggccccttggtaatggttcactaacagctcgtggcttggcttcttgacacccgcaaacagctaccacaaacgcccaacttcaagaagccaattcttctacccaatccaccttcgctaccatctcttcgaacgttcgggattatgagacccgtatacgagtatgtcaatcttttcacgatcgcgatagaatctccaatggctgacggctgttgccggatgatagatgctcgaaagagagaaggaagagctgcggcaagacttttcccagttgaagcagaagagccggacagacaccggtcagtcatgtcgaagtacaacacaataccataatcacgtcgctgataggaaccctgcccactcagacctcgtccgaaagtatagggaaacgtcggagagcgatggtcgtcaaatccgccagctcgatgtggagcgctcggaagccatctacgccaagaacaagatggagcatcagcaaaagatcctcacgtcggctttggagacggtcaggaaagaagtagagatgtactcgaaagccctagtagacaaggaggcagaattcgcttcttatcggtctagccacgtatgttttagacatcgagcaggtttggagcaccaaactgataatgataaaccacttgaaccctcagtacatggagctgcagcagacactatcggaacgcgatcgcgaagcccagctacgcttgcaagtcgaaaaggctcgggatcagatcaatcgccagtaccaggacaacctagatgcgttgaactctgctcagactgagctcacggcgctgcagaacaagcttttgaaaaagtcctccgagttccgagcagacgcggccgcactacagaagcgcatcgactcgctagagaaccgtagtaaagaggatcgagaagccgtcgagggtctggaggaagctttcagggaggcccaggaagcccacgctcagcgcgtcggagcgtacgaggatgagattcaggctgcagcagagcgtcaagctcaagcagaggagaagatggaggagatggcgaggacggtcgagctcctcagccaaggtgtcgagtcgagctcagatacgtggggtggcttgggcggagaggccgctggccaaatggctgccatgattgggtcgggttctgctaccaccgctagcggaaagaccctcaagcaggcattggccgaggtagtgaggctgcaagccgagagtgggaaactcaaagtggagaacgaaaggctcgagtcattgtgcaggagtgtcttgagggacctcgaagagagggtgagttctgaaaccgctggtctgatcagatttgccatcatttatttacacttctgttacgaatgtagaaaccggtgcttgaccagcagcgcgcagagtatttcaggatgaaggctaatgccgacgacctcgctcgacgcctagccgaaacaattcaagccaaggaagccgcagaatcggagctcgtcgagattagagcccagctgaacaacgtcactactgagagcaagacgttggagagccaatcggccgaccttggtctgcaagtcagagtgcttacgagggagatcgccattagggaagatcccgcgttagcatacgagccttttgaccctatcgaacaggatcatccagcggtttcggatatcgatgcagtcatcaccaaccacctcaccatgttcaagaagctaccgcaactgctggagcaaaacaagaagctgctgaggatttccagggaactcggccgaaagttggaagagaagggatcaggcgggtcttctggcggcggaacgaacgataacgacctcgacaacgctgcacaggccatcgaaaagctgaccgagactgtcaactccttgagggctcaagtggtagactcgaggactcagctggaattgtcgattaaagagcgggacatgtacagccgccttctcgttcaaggccgcatgctcggcatttccagtgaaacgatcgacaagatcgcctccgggcaaacgaactctgacggaacgcagggtcaagacgacgttgtgcgaaacgtcttatccggtatccaggccgagtttgagaaacaccgcaaccaactgcaaacacaagtcaaagagattcaagaaaaggtcgaggagaagaccagggaagtagaagccgaacgtcaacggacggcttcggctctggcttctctgcgtcatgaacaaagtgagtttcacatacgcgaatcgtgaggatttcgggtgctaatcaaccgtacctagaccaaaatctaaccctgacccagaagatggatcaggagaaatcggatcttacaacccatttgagtactattgctattcgagaagccgagattctcaatttgcgcacggaattagctagagtaagggatcgaaacatggtttccttctcccccgagctgacaagacaccgtttccctcaggtcacgaccgaggagaatcacttgagagcccagaagaaccacttgcaaacgtttgtcgatggtttaaatgctcaaaaggagatgctacaagtaaacagtctctgcattcgagcatagcccgtagagcacaactgaataaactgctcatcaggcgaacgaggcagcatcagctgaagctacaagcaagctactgcaggagaaggccgagctatctcgagaaatctcgagtcgcaagcttgttcacgaccaggaactactcgttgcccagaacgcaaagcaggaatcggagaatgctctagcatcactacgggaggatctgtaagtaccgtcgtgcttggtagtgctttctgagcgactcatctttcatcctgcttgtagcgagaaggctagaaatgcactggcggaacagagaaccgccaaccaggccttgctcgtaagcgctcatcactttggatacgctgggatcgaagctgatctctcgatcacaagacatcttccaagtcccctgagctgcaaaagcgcattgacgaactcgaggccgaattaaccaccgccacaaaagagcgagacgagaagatcgctaaattgcaagaagagatcacagctgcacgagccgacggtcaactgaaattgaacatcggtctgaagtaccagaagcgaaccaaggagctcaccgcccaaatcaatgagacgaaggagacgcatgggaaggctgtcgccgatctgcaagcacaagtagattcactcaccgctcagatcgagaagctcaacgaggagataagctctgccaagcgagatgcagcctcaaaactgaaggaggcagacgatgtcaagcaagaggtggccaccctcaagacttctctcgcagaaaaggaaacggctctcaaagaggctttagccagtgccggaaatgccgaggcttcgtcagcggtggctcccgtgtcccctcagggtgcaacggccgaggtccaccaggcactggagcaagccaagcaacgtatctcggagttggagtctcagctttctaccactacgaaggcgcgagatgacgcaattgcggaacaggcccgtcttcaagccgcctcgacggagagcgcggagttggcgtccgcggacgatgctcttctcaaggacttggtgggtagcaatgcgtttgaggccgattcgagccatgtcgctgaaatcacgtccatgataggacgcccagaaagcacagcacgaggaggctttgcaatcggctgatgctaagaccgtgagcaacgtgtgccacccaattaagacggagctttgaccgatttgccctgtcagtcttccgctcaacaggaggtacagcgactctcgaaacaagtcgaagcgctcgaaaaggacttgtcggaagcgcgtgctatggtacatacggctgtccagcccgaggctaccgcagccacaaccacggttgctgtggccgacgaagaggaacctggcgagatcaaagacattcctgcaagtacagatgaggcaacggctgatgcaggcggggagtcccagaaagcattggacgaactgcaagctcagttcgacaagtacaagtcggaacaaagcaccaagtatgaacagggcgtgatgaaggtcaacagcgccaatgtaagaccttccggtgggtatcagcatcgacgtcgttgatcgagtctgtctatgttgcaggtcaagttgaagcaggaaaaccaacaatggcgaggagttcgacagcacatagagacattgcaaaaggagtttaaaactccgacgcaaggcggaaattttgatctaaacacagccattgacgagatagtcgaagtactcaagacagagcgagacaaggcgctgacaaccgttagcgaggtcaatgccgagaaggtcaagcttgaagctgctttagaagctgcaaagacagaggccgctaccccggtcactcgacccgccggagaggacgtcactgtcgactcggctgaagtacagaaagtgtcaaaggagcgagacgaactgcgtcaacagatcgagaccctgaccacgcaatgtcgggcttcagaagagaaggctgccaaggcagctgtcaaggctagcatggctgacaagtacaagaaggacttgacggaattacgtgccaagatcgcttcgggacagctggcacctccgacgacggcaggagcttcgggcactcctactctatcgatcaagggtgaaagtggagccactccggtcacggccgcgtccactgatgatgcgatcgatctgaacacggcaggtggcacgcctgttgccacacggggtacgagaggagcacgaggatctacagctcgaggcaccgccccgagaggtgcggtacggggtgccgctcgaggtcgaggacgaggcgcagccgcgaacggcgcaaggcttgatgtgcaatcagtactggccggtatgttacgcccgtgatttcgattttgcttcacgctgacgacagccccgtgaaaaatagccgtggagcagggtttcgcggccccttcgggccagaaacgacgatcatcagaaaaccagggcagcccgactcaaaaccaggacaactccaaacgacccaaactcgaccaacctccaggacccggcgctaatggcggcaacaatcctcctccctcgtagatccatcgactgatgtacgcacttttacgaagttgaacgacttgacatgcagtcataacgcgtgttgtaaactataaattctctcggcatttcgcaagaccctgaccttatccgttcgtgcgatccaaagtccatgcacggatcttgcggcaatcatttacccacaattgacatgcatcagtctacgcatactcattgagagacggaccaagagccgacattctatggtacggtcaggtctcgagatcgtctcggcattctgatattcgtcaaaggtgcgtgatggattgaatatgttcggcccagtggtgtatgcgtgacggcgcgagtggactttgcccaatcccgacgaccgttcgacaaggatccgagacaaaaaccatatattgatagcttcgcgacccggctcgtctctcgttcaagccaggtgatatccctcccacatgctccttctccaaatgctcggcagcctcttgatccacattccgacggggtatgtcgaaacgcttaaaggttgagcttggttcgtcgccaatgcctcctcttggcgttgtactggatggtggctgcgagaacgagagaaagacgaggggtgggtcaacattttttggcactgccgaaggatttattaagcctagcgaggtgaacatactgtcggtcttgagactgcacgacgagcgatatgcgggagtcagacaacttgttccagataaaaccctggaaatgagactcaccggaaccactgggggatggggcggttctgcctggcggccttggccaacctctgcttaaccctgaaagtcttttgggaaggctgtgaagaacagaaaaagttcaaggcggatgagctcctgtcgagcggttcgccaatgcacagcctgccaaatttgagaaccggaaatctgggggtgagtgggggttcatgtatgtaggcttgtcggtgtgtgtatagtggagatgttgttcttcgatagccgagaagactgaaccgagactatgtcaaagctcgacctcatcgactataaactggtcgactgtgaccggttcttggaatgttcgtaatctcctgacggactgatatatgcctctgacatacggtcatccgtgttgtccaccccttgtaaaagcagtcgaggcgtttgttgatcctccatcccgtttgcccatgaaccccacacgtaaacccgtcgtccccgatcctcaaaatggcagacgtgtgactatgttttcgatgctcaccatctcgactactgttgctgatggtgttgctgaagttgtcgtgaagaggagcagaactgtcacggagttgcgttctccacgtcttctctatcgataacgatcaggtcaatcatcacgatggagccgggatgctgggctgagccgagtcccccgcgcgtggaaaattggcaactcggatttaacaattagaagcgcaaacgcgtgagaaagcgagatgcgcttctaactagtgtcgcgcctgctcggacccgctgcggcctggcaacaggtttcatatatcctttgttgcagaacgatatcgctagcaatggtctgcatacatcgttcacgtctgaacctcatgaaggccggtcttatcagcatgactgcaagtcttcagtattgcgcttctcgatgaaaaacatgcaggtaaaaagtcatgatatatgcgtaatacaatttctctctgcgctttgcatatcgctgtcaagttgtcgtggtataaaacggtctgtattgtgttttgagcagctgtgaatctccaactttccgatccgcgatgttcttcctagtctagaatccaagtcctaatgggtagtcgacgcgggttgtcagtgcggcagcgctttgacgcgacagaattgcagaaactcactcttaatgatggcgtccagcgtagctaatttgacgggtttgacgagactggcagaatcaaagtcgcccatgatgagctcatagattatgaaagtgaaaccccaacgacactcactagccatccacgccagccgcgaatgcctgcttcttgtcgtccgccgtcgcccggccactcagagcaaagatcttgacgcgctgctgcatgaccttttctcccaccggcttctcgcccgtcttgatcgagtcgtcgagccgccgctctgactctaccttgcggatcgtccgtgttgcctcgataccatccatgaccggcatggaaaggtccataaggatgatgctaagaggtaaaagagcgtgtaggggtcagtcgagggacccttgacgtatgtcacattgagagcgactcactcccaatggccaggagcggctgtagtgaaggcatctacgctgatctgaccgttgacacaacgctggaattcgattttctgtcacacaacagaggacagagaattgagtccttatcagtcgggttgggcttctatcacgggatataatccagcttacctttttccgcagataagcactcaacaactcgaggttgatgtgattatcatcgaccagcagtatccggggcttgcgaagagtaacctcgggcggtacggacgccttcttcaacatgatggccccatccgtgactgacactgttgacattgccgagctgggcgaacctggcacagacggatgttcatcggtcccagagtctgacccgatgacttggctgaccattgcgtgtaaggatggtctcgtatcctgatatgttgtgcttctcgggctcattcccggtcgcggtagacgtctgctttgtaaaggcccgtcttcctcggatcgacgccgtaacaacgtgccgggcgcactatcatgccttagcctgtcgaaaagtcttccgtgaggaagctcgtacatgggcgatccaatcgtcgtcgtagactcgcgggaaagatccggtcgcccaagccgatcggcactgctggcgatgctgctggccgcactgaattcacgttgcaaataagccggccgatctgctgagctagatgtttctagaggcgagaatggaggggaaaaatagtcggaccggttcgaacgggaagaccctacgcttgtcggcccgttcgtcaaagcttgcgcacaggcacgtagcgcggcttgcaagcgctgcgggcccacaggcttaaagaccatttgaacgaatcctcctgccttctgatacgcggacatggcagcgctgaatcgagccgaccggttggtcgacaggatgaggacagcgcgcgacacatcgttttggtccaacaattgacgcaagagatttccctcttcatccgtgatgatgatgtcccctttcgcgtctgaatcattggctatcggctggaatgcccaccatcgtaggtattgagtgatcagctcttgattcaactttgatccacgatgttttgactggaagttcgtcatcgacacggtaaagtggcgtccaaatgcgttgccctcgttccagtagccagtacctgaagagctaccattgctcgaagtcgtttcttctacgacctcgccgctttcgagctcgacgttgagcgtgatcttgatttccgttcctaaaccttccgaggaccagacatccaccttgccgttgacgctttcggatcggacgatgctattgacaatagctagacctaaaccggtaccggtttgcaggggattctcttgtgagaacgggtgaaagagttggtcttttaaaaagcttcgagagatacccttgcccgtgtcgatcacagccatctctactgggattgtgcgactgccaggggtgtgaggcaattcgcgaagggtcacttggatgtaaccgtcgcgcgtgaatttcaggctgttgccaatgagattcatgagtactcggcggatcccgcccttttcgcagcggaccatccaaccgcgttcacgaaatccaacatcaaccactgtttcgacgtagggtttgtcgacggattggcctttgctgtccggagtcgcgcctggactcggtggagagtaaaagctcccaatctccgattggccctgcagcgcacgggcacgttggccgatccaacacccctccaccgtctcttcgacgagatgtgccaaatcaaccaagccaggtttgatcgagttctctattgatccttttgtgctgccactcagcttggtaaagtctaggacatggttgacagtctcgatgagagagttgccacatgcttgaactgtcgagaggaatgactcttgcatcgtatccagctttgtatcagaaaggagctcagcagcagcgagaattccatgcagcggagttctcagctcgtgagaaatattagagatgaagttgctcttggccttgtcggccaagatcattctgcgcttcagaacggccgacagaataacgacaccgatagcccgcagaaattggagttcgtagccctccaagaattgcttcgatttgttgcaagtgtacgcgcagagtaaggcaaacggttgcttgtcgatattgaagattggaacgactattcaccaagctgactggttagagagcagagttgggaagcgcttgtgatgaagcaacttacccatagcatactgtatcccttcgggcaagatgtgacggatccaactcggaacaacctgctcgtaaattcgcccctcgggatgtttcatgagaaagtccgagaatcgagcgtgttctgtgctggccgcaggccgattcctgcctgggatctccttggatttgttctccgccgagcccatgatattccatggaggtagaggaccaaatgtggacgcccggtctccgtgagcgtcagacgaaacgtggtgctcatcctcgctagccatcgatcccatgtcgtatggatcggcttgatagaccagtgttggttccccgcgcgcgttagtcaactcgacggattcaaactgtgacaaatccagaacgacggccccatccagatctaaagtgcggcagacaagcttggcagcttgttcatagaccttctccatcgatgtcgtcgatcccttattttcgctgtcggccgcattgtccatctctaggcactcgcgtgtgaaacgctccatctgctcgggaaggcggaagaaagctctgagtatgcaggtagcttgaaagccgtaacgctacttaccgaggtctgtatccggtctcgcgctttgagacgggtctgtttggcgccggtacgggaaaggagtcggtgtcagcaagagctcgctccggtcccggcacgtaacggaatcacgaaccttgtctcgccaaagctccatctcccggataactatgccagcgaattctttcagggccattcttgagcgaggaggaaattccgatcgaggttggttgtcaatgatgcaaatactgccgacgttgaaaccctcggcggtgcgtaagggagctcctgcatagaatcggatattcggcgagctagttacgaaggggtgattcttgaaacgccaatcctttgcagtgtcgaggaccaccatgggttcagtgctcctgttaataccgcagacagcatcaatagacgttcttttcggaatggttagaagcactgctcactttgacaacacgacgtgactgcaaaaactgtcccctcgctccgccgtgcttgcaccgagtcccaaatctaccttgtgccagttatgatcctcatctacgagcgagatcaagacgatccgagtgctgaataccaatttggccaaatgagcaatccggtcaaagtttgcgtcctgtgcggtatggagcaacttgaagcgatacaacgcctttctccgctgaaggtcgttcggtggtagaggcgctcgcaggtatcctttttcaagatagtgttcctcgaaagacagagcgcgggaagtccggcgggaacttggtccggattgcggatctacacggccgggaaagacggcggcgctgttagactcgcgattcgacgactgatcatatgatgcatgagctgtgagacggggtttcgacgggccaggcggagccgtagagcttggaagatcgccttcgtcttcactatcggccacagcgctactatctgcagctctttgcccagcattgttgaaacgggttatagtttgcgtagaagaagatcgggagttaagcgatggagggtagacaggagcagcgagctctgatgtaggcggcggtgttgcttcgtattgatgcatggctgccgatccaaagtaatcattgactgcgctcatgctgtcgttgcgttgccaatcaatcggagcagatgccggagggatgctcttcacaggcagaccattgtaacggtttgaacgatactgcgagatcggtggaccggaccccggtggctgcgacgtctgtccaagggaggcatgggtcctgttatctggatgatgttcgttcggcgtagtagccggacttgcgacgatagtgctcaagacggttccgatgacctccctacggccaccgttggcgtcaatcttcccctctcgctcgagattcgccggattcagcttggtccgattacttggccgcaagtacattgaggaatcagaactcgaactattcttccttgccttcgatccgtcactttccgggttcatcgcgctggccatcgggtccaagagctcgcgctcggggcttggagcaccgagaggatgaaatgcgcttgaattgtatagctgcgacgcgagcattgttgtggctgcgccgctggcaagggagatagggcctggtcccgcgcgagcgagctctttccttggcgggtctgctggcgagcgatcaccggggactgagagatcgcgcctctcggcattccattgtcgaggtaagttggtggcgcttgcatgcctgttcatgcgcggcgggctagtgcttattgtcgtagacggcgcggaagaactcccactaaagctggccgtagtcaatccggctgcaagactaggcatatccattcgatcgagggttctttccttggtgaggaagttggctaaagcaaaggtcccttcgtgcttgtccaggtcatactctggcgattctttccggtcaaccaggttagcactttttggaacggaaaagctggctccaggggacgacttggtcgatgaagacagcggtatcagactgtgaaatgctgtcatgggaggtgctggcgtctggtcgggatcccaccgacctgtagatagcaaacacagtaaatatctcgatctcgaggttgtctcgggacaccgcgcgatcgcagacatacctgcgctatacgcctgcatgaacatggaccagtttggcgaggccatttttctgaagctttccgaaggacccagcatctcgacgccgttgcgcccggtatataagcctagcaagcgatggcgtcagtatcaccgagacgcacgcccggcacattggagacagcttctgactgactacgctcgtctggactaagacttcccgccgacccaagcaacttggtcggtcccgagtttggtggcgagctcacactgcccgtttgactcccgcccgacaagccatcccgctgttccttgtccaatttttcccggaccacaccctgaaattgctggacaaattgactcaagcaaccccctcctcccagatttgatgtcgggtcggcagcatcggtaggtgtcgctacgacctcgctctcgtctggaagaccgccgccgttctgttctaatcgacgcaaccgatcgttgagagctctgacttggtccggcgtgtcggcggaatctggaaccagtgcttcgacgatgatccctgtcgaatcggaaagtgtcttgggcacaaatccttccccatcatctgatccgctgaatcggctacttgatactgaagccggtcttgctggcgacatcaatgttgacgtagcgatcgagcctcttgcggatttttggcgctgggtctgtccgtcgggaatattgctctgtacgggccagctttcgaaagcctcgtcgtcctcatccccggtcaactcgtcatcaccgtcccgaccgcccgttccgacgctcatgtgaccgtcggtactaggggtgatcaggccgtctccaaactggctgatccctgcggagggaggtccaggtagagggcccaaatgcaaggaggatgccgtcgaagtgcgggacctgaccgatgtcgagctgccagcgagccggcttgacccgctcggtgtggtctgttttgctctacgatccttttctcctcgatgtagatcgaagtaacctttgccctgcccggaaggtgtcgatgcgcccgtacctgcaccggatccagcagtgagttcaccagtgtatggaccgttataccccgattcctggccgagcttctcagaatcgagcggggcctcgtcaggcggaatcccgctcttcctccttcctgccggcgatggtgccgtgctgggtctcaccctaccgctcgaactttcctttctcgtatgcaacggtacggcgggtctcaaattgcccgaatcctgttgagcaggcaagcgaggtgtggtgctcgattcccccaagttgaagcctggaaaggacgcctgagcttgtcgacccatgttctcttggccaggccccgcatccttctctcccatcgttgccgccgaatcggactcccgatcgtccaatcgtttcttggaagacgatggagtgccaggtcgttgaaagatatctagcggcttccccattaaaccgctggaatgactcggccgcctatcctggcccgagcctcttctcggcgtgtcggcatggtccccatccccatccaccggcgattcggccgtcccctctgagacgtgatctgaacttgtcaatacagtagcccccgccgtctcgtccttggccagcacggcatgtcggtgagcgacgggagaagccgctccgcatacggtgatatgcgagctttgcgggtctgtgtgaaggtggtgtagaagcgagtcggaagagtggggaaagggaggttgctgaatacgaggcgtggatgaaaccgtcgatgaggaagctttgagatggttttctttgagtgaatggggtcgtttgtccttggcagctttactgcctatccgatccgagctcgaagatgcaatcgtattcgagttgatcgtgctcgcgacgggggtctcgtctcctttcacggacgatgtccccataccgacatccaggtttgacatggctagcggtcgatctgcctgttcttgaccaacagctgaacaatacccaatggccgttgcattcaactcaaagggatgttagcaagcggcggaatgcgagtgatcgatcctttctgcctagtaggacgttgcggtcatttgaatactacggcaagaacgaagaggaaagcggcccgtgtatgcttgctcggtgttccttgccgtgttgtgtatggcgaagtagctatcttgtttgtgaatcgtcgcaggaatgatgtgaacaggtgagatggaacgttgtaagttcggggttgggtgtctttcgaaagctgactgagcctttcgtcgggcggtcagggtcgtcgagcgctttggggggggtgggtgtttggcgatcctgggcgttgtatgacgatttgcagccgagaccggaagcctgcccttgcgaatgtggcgcgaggacgttgccaatctggctggctggtcgaggcagtatcgccgcaacctgattgaagaaatggaaggtacgaatactaggctgctcgagctctataggcaatagctatcatgctcgaggaaccgttcagacaaatcgacttgaaaatcgcgcaacttgcgcgacattcaggatgtcgcacagcgagcgaggttgttacacgctcggtggtgtggagccgctgccgaaccgaatccattaacatccgccctccccccatgcccgctcgccgtctcatcgttcagcggtccactcgtggtatcaccctgctaccccgccagctacagctaagattccgtcgctagccaaaaggtgtcaaaagaaaacaataagccagagggtttctgatagaaatagcgaaactctcttttgttcaaacctttcgatgcgaccgttcgaccttgacccaaaccccgcgaaaacgtgagagatcaagaggtaaactagtggaattcgtggtggacgatggctccctgttcgcgcgcgcgagcgcggggaagggatacgcctcgtcgcccggcctgttgatccgagcgtttgcctccgtctcgatcctcccctccttctccctcctcaccctcgaccatctcgttgttccaccgagctttcccgcgtaaaacaagaatacacgctaaaatgatcgtcggatccaccgcgtccgccggaatgttgaacgcgagcgctgtccatctatgatagttttctcacgttgtaaacggaccaacggaccaatcgccaaaggtttcaagctggacaaagcaacgctgcgtttgaaagccttgcgtttcatgacccggaatcctacaggctcggtctagctgtctcaagccatggacaggcttcacgcaggcaatcactcgttctcgcgatgccgcaagtaaagcattcatcatgttttccgcctcaccttcgtggcgtagcaaaggacgaaacgtttgcgcatctgaacaccggattgcggggagatacaacgcagaatgtgttatgagccgcatccgatgatgttttcgtcttcgagtcgtgtgactacaatccatttagcctcatttcgatcgagtcctcgtagccccttgaatcggatcacaatgtgatgcatgccttatcttcttgcgataggtgtagctatgtacggttagtttcaacttgctgctgatcccaagacgagactgaaggcgaacacctaaccactgcgattccaaacgagttcgctttgacacctgagatctcgttttggggctcgcttcagatgctcatatgaattatgtagccaaacgaaagtagcggtacacgaacggcacaaatttattcgtcgctgaggaaaacgacatcgtctgaaccatggctacccaggatttcgacctatcgtaatcgacctgtcgcacccatcgatacccatgcaaagacggaaaagccatcaacctgagaaacttacgcgaacgctctcggcatcgatcgatacttcggaactaaatctcctcaagctttcggcgatacccgtgcccgagcctcgagagagttgatcctcgaaatgatgagaagctgattagacgggcacgcatcgagaagctatcagtttcgacagccatacccagcaacccgtgcaacacatatcaaacccgatcttgatgcagccatctgactttcactgcagaccccatacgaaatcgaactctctcagagcgaagatcgccagtgaacatagcccgaaggtaaaaatctctgcgaacccgctgggtaggagcatcatcatcatcgggggagtttgaacgtacgataggagcagcaatcacgatgttgcgactcaaaagtcagtcaattctcctatctttgccagtatttaggcactcgtaccattgacgctggccttcccaggtctggatggagttgaattcgtcgtggacgaagcggtcgcttttcaatccgagctgatcagggacatgaacgccggtgagtggtcgtcggtatgggtcctttgcatcgttaacgaggtgtaattgaccacacacacacacacacacacacacagattgccccgatgagaaccaagacatgcccatccctctgcctatcgtccattctagtattctcagtaaagtgagtacttgacaccccggtgtaaagacagctgggtggcctaataccttgttagatcatcgagttctgcgagtaccaccggctcgatcgacctccccttatgcgacctaaagatcccgccaaattagacccactcccaccactagctggtctgtggggattgcaagcgatacgagctaacgcgaccaaggaggacgagcctatcgtcgctgagggaacaggtaggcaaacagcctcactcgaaccgggagactctgcttctcaacttggcaaggaaaccacggctgtcgaagggtccggtagtctgaggcagccccaactgcaagcgggatgtacagaggggaatggcactgtagacctcgtcagtacagctgagggacccagcggaaaagagaaatcggaagatatcgtcgaggaaagcttggaactcgagggggagagggtcgtggctggcaaggtcaacgaaggacaagctgctcagctgccgaaagatgcaacggaagaaacagccgagaagatcgagatgcaacccatgtccaaaatcgagcgtgatgcggcggacaaagcgtggaacgccaagtttatcgacgtcagtcccgcctggggggatgcagtctgataatggaactgcgacctgatacacggctgatcatcggacaggtgaaacaagacctcctcttctcgcttatcctcgcctcgaactaccttaacgtctcggatctcctgtaagtctcaagctgagtggaatctatatgtatgtcaattctttcttaatcaacccatggtacgactacgcagtgagttgggcttgagttcgatgggtgctgctatcaaggggaaacctccgacggaagtgaggaaactgtacgggatccctgaagagtgagtctgcgttgaccctccgaaccgtggctagctggtcgaagcaagatgatgcctaacgttgacttggacatgcccgaccagctttgatcctcatcgtccggtcttccccaagaccagtaacaaatccaaatccaccgccaagaagaaggacaagaaaaagtcgagagtggacgggtctgatcattctatggagctggacggggacgagacctcgagcgaagaagaggtaactccgcccgtcttgcctcctcagaggggtagtgtgaggaggccggtcagggctagcaggaaggcagtcgattatacgtttgtgggggaggatatcgattagaggagaccgctacgagacagatccgtcagattcgtagtccgttgagatcgacttccggcaaatctacgcagagaatagggatttataccgacaattacgacttggaaagtaacgatgacgacgttttcatgatgtttacgacaaatcagtttcaggaacgacttccattacccatctaaagcaccattaatgacggagaaggtcgtttgccaaggatgacgagcagtccgttcggaacttgccggctgctactgacctagctcttccggtaatcgggtggagacatgggaaaatcgatgacgattcgtgattggtcgaaatttctggcttgatctgggtcccagcttggcgtttcaggttgcatcatcgcatcaacgcgtcggatatggccggagcgtgatgagggcggtatgatgggcggtgcaaactgacgaggggaatgatttgatggcatcataatgagtctcgtgcggtcgcgatcataccaagcgacagcttgtggtagacaagcctactgatgggccatgcagccagcatgcagcatgcgatgacgtagcagagttgagcaaacgagttcgaccgccaggatgtcgtcgagccgaatcgcatatcggggcataaccatgcaaatgatgggagatagatgagttaatatgctgggtcaacctcctttggtagttcatcaacctaagcatgatctaaccggggcaaggcttgtctgcaacaacgacccctggccatttggcgtcgtacccggtctcgtgtcacttcggaaagactcggtaaagccagaatattgatggcaacaacaagcagcaaagcaacaagaagacatctcttagagcgggaaagacgaaatttgtcgacctgaagaagttctcagaaccgtcatcacgcatctcgacgaccaaacatggatcacttacaactttgacatcatgaaagactcaatggtcgatagcaacacctagcatgattgaaccggcttgacgttcctccaatgtcgtcgggtcttctcagcaggcctttgagcccgatcatcgaatctccgccgacgaccccgcaaaagcaaccaatcacatatgagaagcaagtcggaacagggacgatcgggttacgatcactacatcctcctccgtccgccttcaagaatccgaaatctgtcacttggggtgatctggtcgcctatcggacagtcgatgcgagacgtgacgaatcgggttaccgatcccccgacaccgaagtgagtggacgtcgtcttcggcgattttattttcatgtctgagctgatccttcgtcctatctcgttttgtcgagagcaggacgaggcagaactcatcatacggtccgaacccaagaggttctctgctcagtcaaatctatccactggcacttcgtcttccttcttttccattacatcatccggtgccacttcgactggagaagacctccctcctctcagcgccgagaggatccggatggacgctgaacgcaccccggcaggtgggagaaagaggaggagtgggacgaaggagcttttcaagcgttacgtggaaaggttacgaccggggaaaagcgtggcagtggaagagacggttcagaccttgtacgatggtaccgacggacaggacatgaggcccgtcatctccatcttacatccatcaagcagtccagcacatccccagcggctggaaagcacggatctctctccgcggaacccggggacccatacctctgccccgtcattgatgtccgcatccaccgactcggcaggcagaacacacagtacaaagcatcaacgtagtgcttccattttcattccccccaaccgggtcgaattgccgtcttcgataccttcgagaagtcctcagcctgtgccacccaacttggagagacaagctcgtatctcgggaacttttggaccacccaaacagccgtacgataacaacgcctcgacggggcgggcgcagagcgagatggaacttgaggtcccggatgaggtcatggagaagggtcatacggagacggtcagaattccggcatttcaggtcttacctggcatcactctcgacttgggtcccgctttgccgatcagcagcgagaaatctatcatgggtgttacactgcatccggatacgactttacctgcacaagcggcagctatcaaggagcgtgctccggcttcccaagctaaggagctgggatggaccaaggtctctagaagcaggccatcctttgggtatggaaggaggtccctgtccgagccgaatgtaccgacgattcacgagtttgagcgagaaaccgatggagatgccgacaatgatcatcgcgagcgcttcaaagccagggataggcacgagctggtcaggatgctgaaggaagagttgacaatcgaggacgaggagtatgtgaaaacagacaaggtcgcaccgcgtggctcaacacccaactccagtcaaaaccgcgactctgcaatgtccaatcgggacgactctctggcggatctacctcctcggcctcatacggcctgggacgattggagacgatcagagacgcctcgaggtgaagcacatagccgaacaatctctggttctatcgcccagggagattcccggcggagaactctcagtctggagaaggatttaccgagattacctgacagcgcttttttgagccaacaggtgctcaattacccccaacccgtaagacagagtcaatcacatccgaacgatagtacaaacagcctaagaaacccgttttggaaggtccggaccaagagtaggagggtggaccagagggaggctggttctcccagtcagacaaggagcgtacccctcggagctcagcgccatgaaacgacgccgccaggcgttggcagtgaggccgtttcccttcagaccttccatacccgcgctctcgttcgcccagggactccaatgcctgcgtctgaaacatcgatgcctctgctcttggcgtcggccctgttgtctcagcaggcttcgcagatcctcatcgagctgagttcgatctctataggtccatccgcccgggaaaacgacagcagcggtcgatatgacaagctggacgtgttcaagagccggatgagggagctggcagcggaaggcaacgacgtaggtagagggctcatggattgtgtgcttgggagcgcgcccgacctgccgcacggtcagaccgccggaaacgccctgaaacgcgcgaggtccgatctgggcgggaccaagcggggaccgatgcccgacaacaggtcgagacgaatttccttgcccttagacgtacgctacgatcgccctccccacgatgcatatcaagtgcaccgtccggcaacatctcacggtgactatccagaggtggagcggcgcggcgagatcaggcagatgcaggtcatgctagatcaagcccaagagacgattcgagggctccaagcgactttggatgtgttgcgaccgaacgtcgcacaagggggattcgagaggtcgagcgagacagagcgagttcgaagaaggcgaacgttctggggcgggtggtctaggaaatgagatccgtgcaagcaagccttacgctcgtaacatgttgtgtcggacatccagtttaatagcgataatggtccaacgtcactgagattgagcagcacacgatcgggttttcgacacggggatagcgaggttgaaatctacctcccgcatggcaagctcatgcgtcggtctctcgaaccttgtgattatagtaaattgtgcttcgaggcgaagaagtacaatgcacgcctgtcgatgaggggtaaaggccgatgccctaagattgcttcaaggaggcacaatccaaggcgagcctactccgatccctcggcgggacagaccttcttcgatcctttggcggcgggatgatcagctcaggggttcgatttgacgatatcggttgcgttcattgtgttattgtgtccgttgcggtcgcgtgtgaaaagggcaggggagaagagcgtggcgacacgtttcgtatcgcggtccgaggaacaccccggctttccttcatgtgggcgacttgcagtgacgtccatctatgtgatatgttcggccctgcatgacccgatgctgttggatacaattcgccttgtccgtcccccgcctcatcgctctccaaacaactctctaagtttgatcaaactctcctcgggcgtgtgtctgataaagtgaccctggagcgcggccatgctgaccctccttcctcgtcccatctcctcgtccacaattcgggccaaatcgccagccagcttttcgacgacgacttcgtccacgggatcttccccctgcccgtaaaaccgtttgaacaacctctcggcctgttcaggcacggcgtcgtccaaaagctctttcagatctacccgaccgggcctgaccagcgctgggtctagccgatcgaaatgattcgtcgtcataaaaatgatccgttcttccgccgatgccaccccgtcgagagcgttgagcaggccggaaaaggtgacggaagacttgtacctgtcggacgaagaagcgtagcggtgcaagagaatcaggatcaacggtgcgggcgtagaccaaataggatatcgacctacccgtcctcgctcgtctgaactctacgattgaatgccgcatcgatatcctcgagcaagacgatactcctctctggtgtgatccccaacaagtgattcaacttgtcgtccgtcaacccacgttccgacaggttgaggaggcagatgttgtagctgaggttaccggccaaggcttggataaaggaggtcttgcctgacccgggaggaccatgcaagaggtaaccccggcgataagggatacctacaaggcgagtccagggtggttcgtcaatgacgactctgcagcgatagattcctccgcgggctgactcacctcgatcggcataccatttccccctccccaagaatcttctcagatcgtcctcgaccctctccccgatcccctgggcgaggacgacgctaccggtctcgcgcttcctcctcggtttcccaaacggcctccactcggtaccccaagcggtgtagacgaccgtcttgccctccttttccctatccgccaattccctggcctctttcaggagcaggggaaacaggttacgatccctcgacagcgtggtcagggtaaccgtctcccatgggatcccgctgtggaggtccatgagcttggagtccctctcccgtttcaactggatccaggcggattggtagcgaaagtaatgcacccccgggccggggacaagggtgaagagggcctcggtggatccgttcgagtgttgtttgtaggtcgtctcgacggcgagttggtgtgattggatggggacgtttccgctcaagatttgtctcagcttggacatccccgacgacgacgatgcggacgaggcagaattgccttcgatggctttggccgccttggcctgagcggccatccattccaagaaccaaggataagctcgatccttgcttgggatctcgagcgtgacgaggagtcgtcgttgagcgaaattaccggccaagttgactcctcgacgaagaccagtgaggacgacaccgatacccatgagtccggctccggcggaaaagtatggacttagcttttaaaagggatgaggagcagggagaacgaagcgattcgtggggtttgttttcgagagtgtcaattgtcgaaacggacaagatgcagttcctccgtttggcatcgggactcacttgtcggccatgatactgctcaagagcgaggtctccggcttgtcagcggtcgacgagcttggtagctcgatccccgtcgattctgcatccatcgtgggtgtcgaaccctgtgatgaagattttctattcgtcgatgacgacggtgttgctaacgccagtctattcatggcgagagtaagtctgcgacgatatatctttgtacctttgttaggaaatgtgtaaccaacaagtttgatcgttttaccagttctgaaatctcgaccaccttaccttaccttgatcgagcggtagctatagtaggaatggcttatcaaaataataacaagagggatgacgttcaatgacgtgtcatactgaataccaaatgattccaataattgactcactttgcgaattgattagaatggcgtgatggaccgactgacttgtaacttgcccggacattcgggtcgagtcagaaatcatccatcaaccatcatcaaccacatatctggtcaaatcttgcagcgttgaaacaccatccagacgtaaaacacccaggaccactcatatatacgaaaacagaaaagaaggaagaaagaaacacttctctacgtctctcgtcgatcgacccctatcaaacaagcagatcacgcgcgagtttcgcctcgacctcttctgacccgacccgacttgacttgatgatgaacgacaccagcgactactctgtaccccccaccccgggcgcagcatccccgctcgggacatcgatcgcctcgttgccctcgaaaccatcttccgtggaagatcgccgcaagaactggaggttcgggaccatctggtgagctcgcggctcgaggtccacccgaaaccctccgaaggcgtaccgtgtatcgtcgctgatacactccgccgacccgtcattcctcgactgcagcgccaccaccgagagcaaagatcagtatggggcttcctctgtccctatctaccagacggccaccttcaaggggttgaacggcgagtatgattatacccggagtggcaaccctacgaggaccgcccttggtaggttcggctcgtacgaccttctctgctcgatagccttactcatagccgcgaggcgttgtttcccccgacgttattgtgatcatcggcagagactcaactcgcacgactttacacatgcagccgagctttcgccgtgagcacggggatgaccgcactcgacatcatcctccgtctcatccagcccggagacgtcgtactcgccgggaccgacatttacggtggaacggaccgactgctcacttttctcaagacgcaagggggtgccgaagtcaggcatctcgatctggacgtcagggaggacctcgagaacgtgctccatgaggtcggcacgaggtgcaagatggtcctcgtcgagagcccgacgaaccccttgttgaagattgccgacctccgaatgatcgccagctcggtccacgccgcttcacccgacgcgctcgtcgtcgtggacaacacgatgatgtcgccttacctccaacgaccgctcaatttgggagcggatatcgtctacgattccggtacaaagtacctctcgggacatcacgacgtcatggctggcatcatagccgtcgagcgggacgcggtcgcgaaaaggatagccttcctcatcaactcgacggggaccgggttggctccacaggattgtttcctcctcctccgtgggctcaagacattgtccatcaggatggaccgtcaatcctcgaccgcccacctcgttgcactgtacctcgatgctttagggttccacgtcaatttcccaggattgccgacacacccggatagggacgtccattatggccaggccgatggcgccggtgccgtactcagcttcacgacgggcgacgtcggaaccagcgagaggatcgtaggcgggacgaggttgtggggaatcagcgtcagtttcggttgtgtcaacagtctgatcagtatgccctgcgtcatgtcgtgagtatcgcgcagccgtcccaaatcgagtttctcgataacaagtgatccgagactgatcgccacacacccatcctttctccccagacacgcctcgatctcggcggaaaagcgagccgaacggggtctgcctgaaaacctcattcggttgtgcgtggggatcgaagacccccgtgacttgatcgacgacttggagcactcgttattggagtctggagccatctaccagcgattcgatatcgactcggcaccggccactccgacgacggctgaaccggcgcgggacgtctatgtcgtcgaccctgagaaatggatcctcgagcgcgcaggcaggtttgcgaggagcggaatgcaaggcaagggtcagcaactcggcgacggagccgcgggggacgagaccaggtcgtctaccgtcgccgcattggtagatgacgtcaagaccaagctcggcttttccggtcccgacggcaagcagggcgaggtcgatcgcgacgcctcgtcggccgatcgcgcgaccgccactggggcggatcaggatatcctcgtctcggcaccaggaaaggtcatcttgtttggagaacacgcggtggttcatggagtcgtgcgttgatcgggtctcgtcgtgttcatccggtccgatttctgtttgctcccccactcgcttccactttctacaccgtgtatcaccgtcgccaagcaaaagaaaacaaggcgctcgacgtgcgacaatctcgcgatgaaagacgatcgaggacgcccaatccttgcacaaaagcaaaagcctttccagtgtatcataagcttactcttcccctatgctatattttataccgtgtgtatcgttgcgcttcgtccttgatgccatcgtacctcggcccgcagaccgccatcgccgccgcgatcaacttgcgatgcttcgcccacctctcccgtcggcccgatcacaagctctcgctcgacttgccagatatcgggctcgtaagggaatgggatatcgaccaacttccttgggaagcgtttaccgctcgacccgtcgacgatgacggccacgctccggccgagctggatccagctagtttcgccgcggtcgaaaagtttttgaccgacgatgggttggggtcgaccgctcacgccgccgcgttggccatcatctacgtctacatgaccatcgggaacaagcaggagaggtacgtcgtcgagtcacacgagccaattgagaggtaaagactgatgcatgacttttccacagacgtggtgccagttactgcgctcgatccgctttgcccatcggtgccggccttggatcttctgcctcttacgcttcatgcatctcggcagcctttttgcgcctgttcgataggctcgatgttgaggcggcgccggatgcacccgaggccgatgcgccttaccctggacatcgaggaatcccggcgatacaggcagacttgatcaacggatgggcgttcttggccgaaaaagtcatccatggcaacccgagcggaatcgataatgctgttgctgtcaaaggaggcgcgttgagcttctcccgagcgatgaatggtaatcccgggggtatgaacgggttgcgcgggtgagtggcttcaggccggatctgcgttcttatcttcgatcacctttgctgatctgagagcctgtgacaacagattcaagtcgatccgtttcctcctcactgacacgaaggttccccggtcgactaaggagttggtcgcgggagtcgctagcaagatgcaggcggacccggccgatggcaagagggtcatgactgcgattcaggacatcgccgatcgcgctaccggcctgcttacgtctacggacctgcctcgaagacagctcgtctctggcttgtctgtgagcacgagctgaaacatgcgatgcgcctcgcctatctaactttgcctccttgccagtcccttatcgacgagaaccacgagcatctcgctcatttgggagtctcgcatcccgccctcgaattgatccgagcccgaacggctgcctcaccccacaatttgtcgaccaaattgacaggagcaggtggcgggggttgcgccgtgacagtaatccctgacggcgagtccccttgaacctcgctcggattgccattcacgctaacccattggcccaaacagagatgcccgaggctcagctgcaggacctaattcagtccctcttggacgacggtttccgaccctacctcaccgctgtcggaggtgccggactgggagtccttcgatcggctgctcgagcggtcgacgtcgaagctcctggcgccggcgaacacaatcacatccccatccgcaaagccttccaagaggttgacgctgctcgtctcgaggtctgggccgaacagacgggagattgggtcttcacataagcccacgctgcgaaacagtacaataacaacgcatcgtatcccctatgatttgatacgcttccatgattcatgcctgttctgttgtacaaattcgcgaaggaagcgactggagttgtataaagctattgagtggttcgcgacgtaatcgatcgaaagggaatgtgtgacgagcgcgtcatgacgtggtgatctacgaatcttgtgacgatcacatgcccatcataccacgaagagcgctcaaattgggcatgcccccgccgcctccgcctccaagcattcccatcatttggctcatatctatcggccaacaaaatcgtgcttattagtaattggcttccaggataagcttctttccgcgtccaccactcacctggcataccgggcatactgggcattccaggcattcctcctccgcccatcatggccgacatcatgctttgcatatctatggaaccctcgccatgcttggcgatgtattcttgcatgaccttttgggctccttgcggcgaacccgccgatcgcatctgtcgcagaagctctggcggcatggccttttgcatggcctggacctgctgcatgttcggacgttggccccccgcctgcatctgttgagcagccttggccctggaaaataacgacagcatatcaatcaggaccaccgcctaccgtatgactctggccgaggttcgacctaccaggagtcctgcttgctggcgtttgccataccaccggccatcttggcgagtcccctcatggctcgagcctgtgccaacagctcttctacctctttcacactcgtcccactacctctggcgacccgagcggcccgtttattcagggcataaggcagaccgtccttgtcaagccgcatctgcgagtatcgatcgtacgagattagcctgatgcctggaagaggcgttccgcccacattcgactgacaaagattaaaccgtccgaatccagctcgtccgcccgcatcgagtccatgatgtaaatcatgcgtttcaacttggctcccgtgtcctcgtccgacatgccctccatggccccggacagcccaggaatggatgacatgatcttggacatcgatcccctacgagaagtgaagttacctcggatgagcgaccgagctctcacgaggctgacagataggcctagcccgtccaactcacatgctcatcagggtcgtcagctgttcacgccaatctctcagagcaaacttgccctcttccagcttctttgccatggccttttgcttgtccgggttggccattgctacatcttgcctatacgcgccaacgacagagagttcagcgaaagcgcctcgatgccagcatgttagccgcttacatgtgctcaaagagaccctgcatgtcgcccatgcctagcaatttcgagatgaatggcgaaggtacgaatctttccaggtcgttgaagttttctcctactcctaaaaagatgatcggcgtcttggtcgcagcgacactgcgcgtcgatccatgatttcgagtcagtgccagggtcatcaaggctgggatcggtcgtccggcgagcgactcacgcagagatggctccacctcccttggcgtgaccatccaacttggtcacgatgatcgcaccgaaatccgaactctccttgaacgcccgactctggccttccgccgcctgaccgatcgaggcgtcgaggaccatgatggtcatgtcctggtaaggaggtgcagtacacttcagtacgacaggcgtctagaagcatggcctgtagagtgaagccggactcacgggcttgacggcctcactgatgttgaccatttcggcaaacaattcgctttcctgcttatgtcgtcccgacgtgtcgacgatgatgatatcaaaccgttctgccaacacgagcaggcgagactcaacgacaatcccgcgtttacttttcgtcgaccgacgactgaccctttttgaacttggcgacacccaatgcagagatggctaccggatccgtctcggtgtaacttccgtaaaacgggatcttcgccttggtagcgttcctatcgatgtgaaaagtatcaccaggcggggggcatcagctggctattccttcagagctcatggccgagccaaaagacggtcaacttgctgtttaagctggtcgaacgctcctgctcgaaaggtatccgcacagacgagacatgttcggaatccttttcgttgataatgtacggcgagctgatcgtaacgagaagtaggtcattcaggagagtcagggtcgactcttccccgagagaaaaggaggaggaggaggctcacctttgtacacgtcgtcgtctttcccgctccctattgaccagatccgtctttcctcgatcaacaccgtcatacgatccgttcgaccagctctcccgcgtgctcacctgaataccgactgccatcaagacgttggatttccccttgatgggcttgtaaggctcctgacctggatctacgagagctaccagctcgtcaaagaccgcctatgatcgtgcgagcggggggtaggcggagtcaggggcggggccgggaacatgtcggatgaattggatgaggcgggatttaccttttgcacgatctgtttcttgttcgattctctcacggtcccattggactcggcttcctccagactcttcttgatctacgaaattcaacgtgtatgaatcagctcgagcagacatcgacacacaggcattgcagcatcaaggctggactgaccttggttcggacttttgtccgtaatgatcctacgagcttgacattgacatcggattgcaacagcgccgagcataattccttcaatagcgcttcgattacctatgtttcgtttcgcagcatacgatcgtgattcaggatacaggatggcaggaggatcgttgaccccctatctcgaatggggagcatgctcgaccgaccttgtcatcgaccaccgaggcgcgtgatagttgcccgagggcgttgttgagctgtttcccgagatctgctaataccatcttgtcttcgccgtagacgttgtgtgcgaaagcaggctcaagctcaccgtcttgagggttattgacgattgtgtgtatcttgttgccaatcggtggtcgatgaggtgccccccctccctacactcctcggttgccatggccgtgcccaccctaagtctgagcttggactttgagtcgaccagcgtcatggtaaaatccaaatttcagaatcatatcacccctctcatgcagtgtttgacaagtaatttctgcaacttcgtcgctcatcctccccagctattcttccttcaagttccatcccggcacgactgtattctagcgagcgactggccatgtcgacattgacaaagaaacaacaaaagtcccagtcgttccgcaccaagggcggcaagggaggcaagaaggaggctcccgtacccgaggacgtccccgagcaagacctcttgcaggatgatgacgaggatctggacgtgcccaccactaccgtaccggaagtttcccagaaatcgatcgtggatctagattcgaccaccgagcctgatggcaagaagaaatccaagagtaaattgagcaaggagaagaagctacgtgaaaagctcgccagggaggccgggaacgtcgagctccctggtaaagcagtcgggagcgccaaatcgacaggggagactggtcagaaacgtaaacgagaggaagagatccagactgtgcccaaggtggacaagggcaaaagcaaggcggtggacgaggcccccgcggtagctaccgaaggggacgagaccgaggagagcaaggagaagaagaagaccaagaaggatatcaagcaacgtttcatccttttcgtcggtgagtctgtcgtgatgctcccttttcccatattgtccaccctcgtctgatacgtttcgaattcgaccattcccaggccacctttcattcaagacgacctcgtccgagctcgccgcctactttgcacgggagaccggccattccccctctgtccgcctgctcggatcggggttccagggtcgaggtcgaggtggaatgggacgagtgtcggggggcaaggagagaaataaataggatgagtttcgtcccgtcacgtctcgtctgtgccaagcggcaggccagggggtaatgatggacgccctcgaaacttacccgctcccgacttgcaagatcaacctcttcccccgcttttcccccgcgcctccctcttcatggtcgtcatcatcatcatcgtcgtctcccgcttcgaaagcccgggtccgatcgtccctttccgaagcgtgacgatactgaatgctcgtctcccccactgagagctcgagtgccgtccccaggtcgatcagtttgaccaacaccctttcatccagacccgaccccgaccccgagcccgagcccgtctcttcccgacgtggtcggacgggctcgacgaggatgttcccaggtttgatatcccgatgagctataccccgtccgtgtaggtaagccagggcgtcggtcagttggacgacgatcgagcgggtcaggttggtgaacgtctctctcctccatcgtcgtcgtcgatgtcgtcgtcggtgttgatcttgccctcgagaatccgatagctcgggcgggtggaccagaccgaattgcacgctcagtggggaagggggtgggagggcgatatgaataccagatgatgtcgaggtcaagcgtgtctggatgaggtcgtccaggaaggcaatcccgtctttccgtccacccgcctgtccatctccatctccacctcgtgctcctgcctcggtcccctcgacgccatcgtcgacgttctcgccggggtaatccacgggggcgaacctcggctcatctaacaagtcacctaacgtccatcgatgaaacgggaaaaacagctcccatgccgtcttcaccgggtcgtaagcgtggtgtaacagccggatgatctatatcggatggcgcggggatcgctacggtttgtcccgggggtggttggggggaagggaaagacgtccttctgatcagctcgagtcgacaatttcagacgtacgggtgtgaaagagtgactaaagcctcgggggagggcggatgggctcacgttgggatgtgctagagaacgtaggagacggatctcgtgatgcacgtcgtgaggcggcaagacggccatctccgcaggtacgaccttgacgcagaacccagggtgcgaggctcggcttggattcggatttgctacttcatccgaggtctcggtagattcgattgggtcttgaaggagatgacgggatgtttgtgggtcgagctcggagaggcagatgtgatagacggtagagtgcgtgcctagcaggaggtcgagatggtaaagcggttgagagctagttatgtcattatagcatagatcgagactcaccttgagccattgatctcatgtttgagagctatcagtgtcgctgtcttgcctgtgacgagccggtagaacgagtctatcaggatgaccactactactcactaccatatgatagctacttgaacagctgctactctcccgtcgcgtcgcgtcaagttcaaatagaaatctcgcgttccaaagtcgaaatgagaaagaaatcctaccgtccatcatcatcgctatcatcccattgcatcttgcatctgaaaccatagccaccactcatccatcgtcttgcaagacctcgctgctaccacttcctgatcctgtacctagatcacttcaaaaataatgccccgagcgaccggccccgccgcatcggtcgacccgagaagagcggcccaggctcaacaagatcaagccatggcaggtctgggcgatttcgatctcccgaggacgacggtgaccaggttggcaaaatcgcaggtgcgtcgtcaagcttcatagatacaccgcgaggcgggataggaacagtttgttcactcgtacgggagggattttggttgttcatgaacgacggaccgtgcgggggacaggtcggggaatcggcaaagctctcgcaagacgtcgtctcggcgctcatcaaatcgtcgaccgtatttatcaactatctcggtaggtaccacctagcctcgaagttgattatccacgtgctgactacaccttgtttttattcacttgatctcgctaccttcagccgctgcgtaagttccgctggcgtctcttctcccaccgcgacgcccgacaaacgattaacccgctccttgcttcctcttcacccggcatcaccctcagcgcacacgaacacgccgaagacagtggccgtaagacggtcgcttatcaggacgtcttccaagctctagggatgatccagtatggagggtccgaggaaggggtgcagaggatggaaaaggtgctcacgagcgagatcgatggtcagtctcggtgctagcgagctgtgcgcctcggaggtccggcgtgtactgatacgatcgtactatttctttttccttttttttcgtcctcatgtccctcctcctcatcgttatcgtttgtcccgcatgccgatgttggggaggaaatacagcctgggatgcgattcagaaacaagccaagaacaagccggcgggggagagtagtcgcgggaagaaccatttcaagtccaagtcgggcgcgggatcgggatcgacaaatcagggtgctgacaacaacaacgacaacgagaatgagaatgacggtggtggtgatggtgatgaggaggaggaggaagaggaagaaggggaagaggacgtgatcgtcgtcgtcgatccttcttcacgagcgcgcgggcaagggaaaggcaaggacaaggccggggcaggagaggtggatatggacaccgaggtcgacgaggatggagcgcctgtagttggggcagcaacagagcaggagggagatgaggatgaggacgaggagccgatggaggagagcgatcaggagggggaggagaccgtcgatgaacgcgcacgcgggacgggaggtagagacggggctgggtctcccgacgaagatatggtcatggactctgaagaggagtgatcacttgtatctacttgacggtgataggctatgctatgttatacattagcgaaagtgtgacatcgatgacatgccaatgttggttgttccccgtgacctttttttcacgtgatcacgaaatgttagacgatcgacgatggaccgttcaacaggttcaacatcgcaagggaatgaacgtaattgacaatttgtcgaggtaaaccgtgacgcttctgtgcaggcacttcatagtccattgtaccgaccgtaccagtcgatggaagccatgtcatcaagcgctcatatcgcatacgatccgtcccctctggaccaacgcattcacgctcaactcgaaggactcggcgagctcgcgacgtatctcacccggtcggcttcttcaagagcgacggcgggacctagccagatcaaccgagcggcagcgtttcgagagcacgaaattctcgaggagaaggaggagatgtccaacatgaggcgggttcatctaggagacgaatggtgggccgatatgacggagtcagagatggtagggtacctggagcgtaaacaggcaggtaggtccaagccgagcgatcctggaccgaggtaggtttcacggtcttctgtactgattgtgagacgtgaattatcctagctctgaaaactcttcaagagcggatacaggctacgtcttggcccaaggtcgagctcgcagatatagccatagattacgaaccacctagtgcagacgctacggatgacccggcaataccgacatcctctctgcaaccggtcgtcccagctccagctcttaccgtcgatgaacactcggacagctcctcggacgaggaaggaccatccacacgccccactcgattgctccccgccgcagatcaaggggaagaacaggcccatggcgtaagggacatttcgaaagccatcgagactcttcccgaatccctacgaggaccgttgaaagagatccttgctgccaaggatggaaccgaggtggtgaatgaggatggactgccggtcatagatattagggaggaagtaaaaccgggtcagaagggtacggtggacgtggaaacggtcgaccaggggaaaggaggaaaaatggggaaaggtgtcaaggaggaggacgaatattggtcgccagctgctatcgcacggaggaaaaagctgcgggaacagctgttcagttcggatgattcagaggacgaggacgacgagggcgagacccgtccttcctccaaatcatcgtccgccgaggctacgtcgagtcaggcaagatcgacagacgagacggaaccatcgactcccacagtcaagcctgggtttatgctagcttcccgggaactcaagcattcaacgccagaggatatcgcgacgatcgatctggttgataccgttcccgacatctcagagcgtgcgaccaaggcggacaagggcaaaggtaaaggcaaggccaacagcgagaccgcctcgtcggctgcttcaaaagaggatgaaactgcctcgctaccacagcgaagaaagagtgtgacttttgctgctcaagccaaggtccggacgtatgaaaagggagaggccattcccgtcgcaaatgcacctgcagacgaggaaggcgagacgaaacaacccgctccggtctctcctgcggctggcgtccagaagcaaggatcagacaaattgtttggtgggttcaaaaaggggttcttgaactcgagtcgaaagacttcgtcgaccttgcccacgaggatcgttgcctcgccaaaggtctcgttgagcaagagtagcaccaagatcgagatgatcgaggacgtcgcttcccccgcagtctcggtcaagacggcccaggtggcatcccaacgcaagatcattagcgcttcaaaggcgtctaaagcagccccgcctttacagttcaggtccgaagtcgccatggatcccgatttcgccctacccaaagacttgcaggagcagttggatcagatgacaggacaagccccgttccccgaaccggattctctgcaacccctcgccccttctcacgacgactctgtcggtgctcagaggtcaaagggcaagagcctgtttgcgatgaggaatcaggcgctggcgaacgggttgatcccgaagcgggacgcaccgactgggaatgtgtcggtagaagagcctgcatccggtgggataattggcacaggtgctagccgcttcgaccgggcgggagatccgaccaagttcaaggtggtcgagaaaccgcctcgcccggtggagaaacgtgccgtctcggaagtgaccgagaggaagcccctcaaggtagcgtcgagacctcagaaggcggtcggtggaatcgtcgagcggaaagaggctatacgcaagacagacgaggatgcagcagagccgatccctctaccagttcccgattctatcaatggtgatcaccaagacaatgcggccccgatgcgaacgcagaccaatacggtggatggaagcgagaaagtggaggtgaccgatacaccggaagcgcaagaagatgccaatgatgacgaggacgaggtcgactcgaacaagtcgtacgaatattccgataccgagtcggtcaactttgacatggatcgagggttattggcgcgggaggcggcgatggcgtatcaccagaaacgtagcgctctaggccgcaaggctctcgggggatggactggcgttgtggacgaagatggcaagaccgctttctacagcgacgaggtggacgaagcccagatcaaaagcgaagccgtatcgtttggcgaaaagttattgtctggggccaacttacgcactttcgacgtcagcaacgaggacgaggatgacgacgacattccctcggtcaacttgcccaccatcatcccaggagcggacaacctgccttcgatgatcagggtcggcaagctagagaatggcaacctgatcctccaggcggaagacgaatccgaagacgagtttgccgacgctccggaaggtctcaagcgagagaccgaagagcaaaaagcgtggcgtgccgacttccgcgagaagatggccgcgaaagacaagaaaaaagagatcgtcgcgcggctgggcaagggagaggtggacgaattgatcaaggaagatgaagagcgggagaatgagagcaaggcgacgagggtggtcaaggagcacgagagctttttaccccagctgcgggaggagagcgcgtccgtcaagaaaccggtagacgagatcgtcaccgagcgaagtggcaagtctcccttggtcggttcggtcaaagagactggcaacgtcgccgagacgaaacccggcgacgagccatcagcggcggtcaaaccgaagaaagtttcccgtttcaaagccgccaggatggctgggaacggtaccgcgtagaacaccttgtacaccatagcacactcaaatgaatggatccacgcataccacctctgctgcctattatgagcaaaagattctgttcttgcccagtcttgtcgaatcgactgacctgagcattcagaggtcgggttgactattttgcagacatggaaggcttcgtggttctgctttaacgctcacgagactacatccctctagctctactgtcatttccccgctgcacaagacatccatcatctagcggtcagtcaagcaagtcatactcattccaagacgtgagacacgtctgtcggacatgctactgcaacctttatagactgcatatgacccatgccttttcaagggaaaagagctttcgtgaatttcataatcgagaggacaaggtgcaagtcgtaaaatacatcccatcctaaccccggggatcttctcgtcgaaccatggaccatgtcgcgctgaaatggatagctaggacgggagaagaaaaaggggggggggagggcgagtcggaaatcggtctcgccgtgtctacttggtcattccctttcgcttctccatcgcactgtgaatatcgaccgtctcctttggcagagcacctgtaagccagaaaccgaacgagggtaagtacaagtacgatcaggacgggtcggataggcgtaattgggtggatgggtcaagatacgtaccgccggacatgaagtcgccgacgtcgatgctctcatccgtccctgcgaggatctctgcatggatgttcatgcttccgccaagaggcagttcagaggccgtcaatgcggggaaatggttgtcctgagtctgttttcgcggaaggacatcgttgtgcgatcagcagacggtagataggcaagaagttacttagatgagccgggggtagacttgcttcagcgacgaggttcttctccatcatggtacgcaaaggaagggcgattccgtatacgtttcgctgaagagtcatcttcatctgagactgagtcgcttgccactgtcaacggggatagcgaaagcgttcaatagccagacacaaaagatgccgccgaaagggaacgagaatgaaagtttacggtcaaggcgatgtcgatgctacgcataaagttttcttctgactgacctgctccaacctcgactgcaaggcatgtacggtcccagcatctccgttcccagactttaggccgtgcctcatggtatccctggttccggtttgcgcatgagccacgtcctgtgatcagcacgcaacgactccagcataagcacgagatcgacgatcaagccagagagccgagaatccggtactagccttatgagacacgacgtgtgccgagtccgaagcgactagcgaggggggcacgatacggtatgactgatcgggatgaggtgagaaagtgagtcttatgagctatggcgttcggaataacgaaggatcgcgggcagacctaccattttgtctcagagctaatgaagttcgtttgagtcttgtatatgtatctcgaagaggtcgatgaagggtaaatgtagcttgtgcacttgagggttgacggagaatgtcaagtcggtgatcgctgacgacgatgagcaagctcccgaccgctcgaaggcgatgtgtgatggctcacatgaagaagcggacatcgtggcattttaatggatatccagtagatagcgtacgtaatctagcaggaccaggatgtccgcgtctgcgtcggaagctgatctacatccggaaccctcggacggtagtgagtgtatgacctagatgaccatcactaccccatctccatcgccgactggccgactgggtagtattcgtcacaaagtacaaacgttcagtaggcgacaagagccgttacctgtcctacatgtcctgctgactgttgggcccatgaatctcaacaatatggaaactcaacagcagatcattcaatctctgttctcccacaggggtgcggatggtcaactagacgagacgtatatcgcgcacctcaagatatgggaagatgtgccggtcggttcagggcagccggacgagggtagcaaaaaggccagatacttgatgctatccgtcagcaagtatggcaaggtgtttcttcacaaagccaagaggaacaacaacgggtcattctccaagggaaagacctggaacctcgaggatctgagacaggtcgaggtggtcaccgtgagtcgcgcccttagactgagacaagcaaccctgcacctgcatgctcaagttcacgctgctctacagcctcaaacgttcgcgttgtcaatgacatcccggacgtatatctggcaaaccgaaagacctcgggaccagcaagtgttcctcgcgaccgtctgcaagatctatcgcaaatacacccagggccgtctgcctactttgttaaacctcaacttctcaattgatgacgtcgctacggaatccatctctccagcccctcaacacgcccagccaacgttataccacggcggagccccttctgcctcgtcctcatcgcttgcagctccgcctccgatccgctccaggcagggttcgcactcctccaacgcttcatcccagatgaccggccaggaatcattctacactgctcctatgattcgaccacgaccgagcgtcgatagtaggcgtgccgaggggtctttctctagccagaatcggcctatggaagtcggtcaccgggaaggatcgttctcgacgccttcccacaaccacccatcgcacgggcagccgacccagcagtatacgcccgtacccgggatgggcaggcaaatgagcgattcttatgaaccttcgtccttgcagatgaacgggcgtcgggatttcgaggataaccacgcccggtcacaatccaggaacatgaatgtgccttacaatgagcatcagggactctcaccgacccaagcggctccctatctcccgccacctgaatcgagccaggggtcatactcgaactcgaccacgtcgttcgcagaacgtccgtctggtctgagttctcggaacggctccgaggcaagaacgccgacgcaggcaacgtatggtttcagggaacaagcgataccgcccccagcggcattgcagatcccgccggtccagccgatccaagcgcaaacgcaaacgcaaccgccacagcacgcagagactcctgcagaggatggatatgcttccgagtctgccatgcttaccccagtcccggcagccagtagcgggttcgaacacgcaccgaccccgcccgcgttgccgaaaagaaataacgacgctccggtcagatcggaagagaggaaacgagccatgctgcctccgatcgtcacaaactcctcgacgaacaatgctgccctccggccggcagcggaacggcaacaaatacagagggagcccgaggtcaaaccggagaaacctgtcgtcagggaggtcaagcaagttcaattaccccccgagaccgatgaagaacccgaccgagagccccagccaagggctagacgcgcttcgttcgtcgctccacctacgacaacgccttactcccgggatatgctcctccgagcgggttcgtttgctcaagcagaggcattgttggagcaagacgatgtggacggggaagagatggaggacgcgacgatggcaaacgtcgaagagattctcgaagggtttgattggggaaatcatgcggtcgaatcgagcgggtcgtaccgccaaggggctgaagcgatcgaggcaaggttgttggacgagctcaatgcgctggaagctgtgaggctttcaaggtttcgatagcagagtgaggacgattcgctcaccgtgctgatttaccttccaggcgaacattcatgctttcctcgagtctgacgaccggatccagaacgtgctgaaagggatcgacgacgcgatcgcagagatggatgagatggacacgcggatcacgggatacaagatgcagcttggggtaaggccggcttcgatatcggtcgagaccataggggcgtcgtattgatcaaattgacgtgcctacatctagggggtaacggaagacatcgctttcatcgaatctcaaaacagaggtctacaggtccagaccgcgaatcaacaagcgctgctcagagagctggagcagcttctcgtaggtgctttcgttcgctgccattctaatcagtgctcagtgacaatcctacccctgcataggaaaacgtgtcagtcgaccctgctgcgctacggtctttgacccaagaatctctcgagaccgaaagaggcattcagaatctcgaatctgctctttcgacactatacaaggcgcttctcgccatccgagatcgaggtcagatgcttctgcttcataacttgaagtctcagccggtagctcacgcttgattgtccctcgtagacacaaatgatatggcagccgcagccggtcgtaaggatgaatacgagacgtacaaccggcagttctgcctacgtcttgtcgaatacctgatgattatgatcaagttccaggttagtcgcctatgtctttctcgctcatcgcacatactgacagtccctttgacatgacagtccgagacctcggcttctgcagcggcaagcaaggccggatcgggcgaaatcccacctcacgcccaaatggagcagaagttgggcatgtactgcggattgatattgtatatgatcgagatggacgaggagcggtatcagaagctgtgtacagtgagtgtcagaaaagtgatggtataccgtggcagacaagctgacagatgccttttgatagaattacttcagtaccgctgctgagctgcataccaaggagatcaagggacttttcatggcattaatcggcaagttgaagaaacccaccgaggagaaggaggacgaaagctgtgcgttcttctgtggctgtcatcccattccatacttgagtgctgaacttgtctactcgcagctttcctatctgctgcagctattagcacaaagtctggagctatccagcgttcaaggactgtcatgggcaatctgagaggtggagacaagaaggacaagcgggccgacggagccgagatgaaagcatctgaggtgaatgcgtatgtctactatcgtttattgcctccctctgatgtcccgttgtgtatccaggccctggacaaggcattgcaatctattgccgttcagctcggtcgcgaggaggctttcatcgcggactttttacacattacagattccatgctcacctacgccgactacatggacctagatagctatttccgacgccaagcagttcgatataccaccaagggcatgcaaccggcgactgtcaaactccggcgatctgctctggatctgatcttcggctttgtgtcgggcgagctcaaagattggatcgacgcagcgctccagcgagatcgagtgtaagtctatgacttcagaaacggttagggaagtagtgatactgaagggggaactatctcactcatagtcaagtctttgggatgatggctgtctgcgagaaggcgattcaggatgccgaagatcggagcgccatcttctacctgaacatcctgcaacgtcaaatgcagcgcttacaaggtctagtcgaaagatacatagccgaccaagtcaaagcgattgaaaatgcccaattgagcaatcgcaagaggcgtggcgttgtctttttcatcaaacatttccctgtgagtcctgatcgcccgtgagcagatcggcggtgtgctgaatttcgataacacagctgtttgtctctaaagtagaagctcaattggtcgactacgacgattttgcggctcgtaacgtcgccaacgcgggctacgagaagattgtcaataccatgctggacactttgcaacatatggcaaagatggaccggtcagatgtagcaggagaggacaagggtcagcttaaccactcgatcatcatgataggtgagtggtccgggcgtatctgaacaaggaactagaacctaagtaaccattcgatatcggtctcgctttcagaaaatctgcacttttacgtgcaagatgcctcgaagcacgatattgccgctctgcatagctttatggagcgggccaagagcatgtacgacgagaatatgacggcatatattcgggcagtgctgcgacgatctttcggccgaccctgggtaggtaccggttggcgatcgacaggtcaacctgacggcagcgagctgaagatttgaatattctttaggactttttcgaagccgtgcaaaagcaacttcgggcttcttccgcccaagaaatctcttcgagtccatcttacaacaaggcggcactcaaaagagcggtcaaagatatcagttccggcaaggagatgcgcaaggcggtcgatgcactcgtcaaaagaatcgagaagcattactcgttggacgagtctgatctggctgggacggacgacgcggcggccatgtccaccgaggcagccgctctgatcagcgtggtaatccaatcttgcgagaagctcctcgttgccgaggtcagtaagtggtcggctttgatgggccagtgttacgccgaggcagcagcgagcggtgtcggtctcgagtatgggtccaacgatgtggaggtcgccttcaagaaggcgaggggataaagaggacgtgtatcttgccccatagttgtaatagcaaatcatatgatccaaccacgatggagagcaaatcaactgaagacatgcgggttagatctttgctgacgtcatacggaaaccactttgtcaacaatcggccttggctggtggttgatcacgcgccacgggcttagtcacattagactggagagcggcttcttcgtattgagtcgggctatatagggtaggtcagtgacttgtatgactgtgacgccattttagtcccgattcaacacaacctttgccctcaagctttatcaagatatacagcatgcctctcaatctcaaagggtcagcttcggcgcctacataaagtcatatggatgcagcttattagacacccctcaacagttcctgccattgcaaggcggtcgagttcgaactcgaatcgaatacccctgcaccttatcaggtatgccagtgtagcatctgtcgtaagactggtggatacatgggaagtgtaaacatcagtacgcactacgatcagctctacgcaagttcggtgttctgacggtgacggaccacactagtgggcaataccgatacgctcaagattacgaaaggcgaggacaagatgaagtgagctttcgtctctcactcaaacgaacggcaaacgctgacaacggtagcaggacttacaaggctgccaagtatgaaaacggcaagctttctggcctatgcgactcgacccgtaaattctgcggcgaatgctcgaccatgctttgggtgttcgacgagaagtgggccaaggtgagtggacaagctttcttatggctctgatacaatgctgaaagacatcatactccagtggatctatccctatgccgcttgtatcgacactgagcttcccaaggtccctcacggcgcttcgtcgaagaagggcacggatcaagaagaagattccccgatcatgctcacgatcatgagatcttccgcgcctgattacgttcctgttgctgaaggtagcgttgtctacgacacttatcctcccggagagggtatcgaggtgagtctcgaatcgatctagagttttgcgcgaggatgttcttccgccgctgatcgcattgcttcaacaggcttggcacaagaagtataagatgtgggtcgactgaaagtcagagttgaatgagcctatatcgtgtacatgagggttgagcgcgtgaaatgatcgggattacgacggtgttgttaagaaaaccaagatgaaaacccatatcaatggaaaacacttaatctgtcacgacctaccgctccttcggccgtcttgatctcgcaaggtggatcgggtcggagatctgtctagaacgccggaatctttcctctcccagttggactccattcaaagaccttgcaaggcaaatctcgaggtagacggggatgaaaaagcttcgcgcatatggaggcaggttccgggagtctcatttacgctgatatctgaccgcatctcagccacgtactatcagccaggcgtctacatctatactcctttctctttcgtctatggacatatctgaatgcagtgtcaagctgtgccatgccaatatatcttgaggaaacagcctagtcgacataacggtgcaatgctgcgggggcgaacatccgccgcgtccttcgcccccccagggggggaacaagaaagtccagaagccatacaaccgtaggccgaaatgatgagaatgttttgatgtaatcatagaagactgttttgaccgtcaaatagctacgactggcatttgctggtttcaatagaaacagcgtcaacaactgatgttgttgttaggggatctttccctagcggcttcgaccggcaatgcctactcgaactagagtttaggcgaggagactccgacggtctgggacgacgtctctttcgacagggcaacgattgactattgtcgcatcaggagatgttgccgacctaggcgacgaagaacacattcattgcaccgttcgcgagcatgcggtgagcataaattctggcatcgcttcttgatgctatgtttggatacaacatggtttgcggtttcacgaccaattgtggctcgcgttgatacaatgtgtgagcggttcactttacccccatctgtttgttgctgacattatactagttgagaaatcgaagtagagtcgaagccgtgtgggtgggtggatccggccggtcgacggtatacgtcgcccctggtcggtaatccgtctcaagcaagcgagactgtagggaagttgtaaaatcgctctgtcgtttgtcatttcgtttgtcgtcaagaccgctgcagtaagccgagtccggttggttttgggtatgtgatgtgtatgcgtattctgtaatcggatccggttgggtggagaggtgtaatgcccgagccaatgttgcaagcggcgtcgtggcagaattaatggccgggtccgccaaccgacatggtcgtaggtgctgaagtcatctgaggactattgttggtgttgatgggactaccaccggctcgcatctggccttggacgttgttgctactggtggtgcgctgtgcggccatcatctgattcatccgatgagtaggcaactgcaagttcatctgaccgttgctcatggcaggcgagctgggctgctgaccatttgcgcccgtattattctgctgcgcttgctgctgtcgcagcatctgttgctgcttcatttgaaccatccgttgctggtattcagcaggaacgttgggtgggagaacgctgacgccgttgggcattgggaccgtcgcgccgacgttgggaccaccgggttgagacatcggttgacgaggcgattggtgcagctggctagcgttggacacgggcgaggcagattgagcgtgatgtccattggggatctggacgggaccgttaacaggcgtcctcatttgatcgagctgaggctgaccattctgctgaataggctgagcgatctggccgtgaccgttttgctgcgcacgtgcggcgatcatggcattcaggatggcgggagaaccaggcacctgcctgcccgccggaaactggcctggcggcaagttctgcacgccattcactggcgatccgggaccctgaggtggtcccatctggccgacgttgcccgaagcgatccggcggacctgaggcatctggatcggctgtccaccagcgagcgctgctgccaattgagggttggtctgagcagccgcctgaatccgtcgggccgttgcagcagcttgaatctgctgcggcgtgtacggctgaccgttattgccaagctgtcctgcttggcccatagcttgggcttgagcctgggcctgggcttgagcctgggcctgggcttgagcctgagcgtgttgcaccagcaactgctgagcttcgcgctgatgctggtaaagttgcgcttgcaggtcagcctgttgctgctggaatggcacttgcatggcctgagcgttaggcatgccctgaaccggttgcgggagttgaggcggtacggtccgggtgaaattaatcggggcaggtttctcctcgggcagagcgaggagcgatcggactttttcgatgaccgagagtgagggcgtcataaggtcgagatcttcctgtttcaccaaggaagctcgcgctttaatgtacctgatatcgcgcgttcgaattcagtctaaacacgcaaacttgaagcagtttccacattgccaactcacctcgtctcgtaatcatcgatgacgacctgatcctcatccttgacgcccatcccgacacccaccaatccaccatcatagtcatacctccagcgttcggacaacatcctcgccctctcctcctcctgggcctcccattggggaccggatcgacggggcgatacgtcttcttcgtcgtcctcgttgtcactcgaatcgctctcgaaaacgcttcgcctagcgagcgggttgttgggaaacagccgcttgaacgggtcctcgggcgccatcgtccccggcggtccagaagagttaggcttggcttgcgacaacgcggtatgtcggacggtaggcatcttgcggtctaaccgcatgacacctccacgtccacgtcgtaatcggaaacaaatctgatgattgggcggccgagccggatgggcgacctcgcgcaacatgttcgtctccttttcccgctccatgtcggcgatggcgggcacattgtcggcctgaccattttctgacctgtcgggcgtcgactttttcgcgtcggtcaagacgacgtcgtcgccttcgccggcgtggccgtcgtgacccagagcatgacgaggagaaggaggaggaccgactcgtacgtcggtcgccgggaggcatcgaaaatatcgcaaaggtgccggttgaggtaagggttggaacgtgacgcccgtgatctcctcggcgaaccgatcgatctctcgtttgcgcttcatctccttgtccaccttttccgcgataagtccagcgagctgttcgggagggaccttttccactgcaggcgaaacggctcgggagcgcaatcccttttgctggttggccgaggacgagatgccggcggttccaccctgcatctggtgatgatgcatggccgacctggccgcttcctccctctccctctgttcccgatccccgctgacccgctgtcgtttcgtcgccggctgtccactgacggacgacacgttacgatgggggaacaagaacgtctcttcctcttgcgacatgggcaaggccgggtttttgcgcttgacgtcgagcaagctccagcgagcgtcccatacctctctctccgccttgagcgcacgctgcttttccttttcccgcaacaaaaccatgttgaccaaaaaagtcgcctgggtcaactcggtctggacctgttcgagccggttgaccggggtggtatccttgatcctggtctttcgctgcaccttgaggtctcgtcttcggaaacagagataaggatccgactcgttggcttcgtcaaagttgagttgagggatgatactcttgcccttgcgttgctcctttctcgacttccagtgcgggtagatccgactggccatcttgaccaacaagctcggtgcgggaagcccgagcggacgttcgaatgagggaaagtacgaggcgggcggggtggtcttgaacactggttcgatgctgaccaagggcggcaagagggacaggtccgtatgcagcataggcacgttcttttccgtccaaagctccaacatgcccatgacatactcgaacacgtcttcggcgatccgcatcggtccagcagacgaggtggattgagcgtccttgtccttgcccttggatgaggacgaggacgagttgggcggctgtccgcctgcacgtgcggatcttcctgctgcaccatccgcactgctaccctcctccttgccgttgaacactttcaaccattcgacatcgacatcgtccatctcatagttgagtcctccccagccataacaacattcctcgactttttccgaaaacttgatcaagtcctttgggtcggaccaatccacccggtcgacgggtaacagcgagtcatagtcatcggcctgaccgttggcgtcaggtgtagggatgaaataggcgggcaggggttgtgttgcgggtttggcggcagctcgggcaaaggaaggggagggtggtcggttctcccgattatggataacattggtatgcgagagagcggcttgcagatgatgctcctgagcatatcaaaggaaaaggtgtcagtcatgcgagtctcgggcttggaagactggacgtcattgggcaagggggtccaggagtccagtcgagatcgagctcgtcctttggattgaatgcatgtcgcgcgcatcgtcttcctgtccaaccgacggcccctctctctctttccatctcgtcacgatatcctgtccacgtcatctcttttcctcatgcattgcccaggtcttgactcgtcatccaaggttgttcgacattctacactgtcggtatccatgtttgattcccggatggtcgccctgatttcctctttcggccgagtcacgcgcgcgggttggtccaatcaccttcccaaagcggaaggtcaaaacaaagggagacccgaccggacacctttgctgtccatgtcgaaggcgatggcgatatcccaccttgcccaatgacgatacgacgagcacgaacagactcacattgctctcctccctttctactccgagtgccgagagttgtttgtggccctcgtcggtcgattcaaagatgtagtcgacagcgtccgggacgttccccaacaagatcgagaggggtgcgcgcgcgccgagcttcggcctgcgtctgatggacatagcattcgaacgaggtttcgacctgggatactgatcggatcaccagggagaggagaacgaggaggatgaatcgggaggagagagtcgagagaatgagatgtctatattcgtttgatgtggtccaatctcttctcaacagcccggttcgtttcgctatgtcggtcgaatcgggcctcgtcctttcctgtggttgccgtcgacgtggcgaataggtcagcgggacgctggcatgccggttttttttcctcgttaggggggggagggaaattttaaggagatgtgagctggcaaagatcgcgcgagagacagggagggccagggtgcgtgcaagagggaaacctcatccctgcaccttgcgcgcgagtctagctaaggaaccaggcgagtcgaaattttacagatacacgtcgctttctcacgcgcgacacagagagaaaggtcagtttgacgaccatcgattagtagagctgggcagcgctctcagttggcagtgagcagcagtcaaatgctgtgtgctagggtctgtatcgctggaatcaaagattatcatgtcgctccaacgtattacctgtatgaccgtcgtgaatccacgtagagagggcgtttgataaggatcaagcagtgaccacgcccggtcagccttccgctcgatcgcccctgttacgagcagatcaacgacctctttcgcaaagacgacgaacaagatgtttgaccccatccctgcctctgggatttctacttccattccgtccccttcctcttcttccaacccttgccacgcccgtgttccattcgcttgccggcgaagtcatcaaacttgcgtttggcatatcctccgagttcttgatccccgacgatgctctgtacgatatcgcctgggttgtagtgtcgttcccgggtcagcgtggtggattgcaaatgtcggggcggagcaactagggttccgatctgaaattcggcgcatcgtcgacgctcagcttgtgacgcttacgagacggcaccagactcgatgactctgttatgactaagggcgactcacagcgaaatgttcgggtacggtcgacttgactttacccttcatgaacctcttggggtccaacgaatccctcaggtgcatggcctggtagtctcgtttcatttgcggcaagagggccgaagggatcgtcggcattgaggaccaggcttgcgaggcggtctttcggggcggtagctgatagacagagcaagatcgaatacgggtgtaagcaagacctgacaagggtaacgcaagtgccacacgtctttgcactcacggcgagcttttccttgcggctcaactgtttttcgtatccggtatcatccacctcggcaccccgcttgacgacgtcctccaaactcatcctctccttgcccttgcccttgacatccttcgatccgacctcgtcgccttgttgctcggcttgacggagacgttctcgctcgagtctcttttggcctaaccgatcgtgcgggcccaaagacaggttgtgcagcgggatatccgtcttcggaagctcaagacccggaatcggtctaccaccgcgaaacgataatgctcggatcagttgatgcgatcgagcaataccggaaaacagggaagttcaagcgctcacctttctcgcttcctcttttcttcccgcgccttggcctcggggtccaacacccaaacgtcctcttcctcgccgtccatctgacccttgtccccgctctccatcgattcggcatcggctacgacgggcttcgactgagcttgggcggaccgaagcgcacgggcgaggaggacctcggggtcgacgtcttcctcgtcctcgtcttcacttgacgactcgtcgtcatcctcgtcatcctcgtcgtcgtcttctgacgatacttcgttttcctcctcatcgtcctcttcttcttcgtcctcttcggcaacgacgggtaacgcccgggatccagctttcggcgtcgcttcaccatcctgcatcaagggaacgcgaacagcagaatcagcaccgaacgatgaaccaggctttccaaacatttggtctgagaaggggaatacgcaaggagaaaagcgaggtatagaccaaaacagacgaagaaagggagtgcagagagaaatggtccactcaccaatccgatcgaaccgtcctgatcgtgatcgtgatcgtgatcatgatcatggctccgagtatgagcagcgacgacctcttcccccagtcccgtaacgtcagaaagcttgacctcagccgcattcccatgcccatcccctgcccgtctgacggacctgcccctccccctcctctgactgatctcttcgtcctgttcttcctcggaagaagcgggtacggaaggaccgagcatatcgtccgtgatcgtcgagtcggtcttttccatcgtccgtttcgaaccgggtttcgagcgggccgagttcgagttcgaattcgaggtgggcgtggtatgtgagtgagagtcggagttggctttcgttggcgtaggggtaaggatctcgacctcgacctccatcttgcgtcgacgaggcgtcgatgtcaatgtcgaggaagaggccgcgttctgttgatgatgggaagaagaactcgacgcctcggatgatccttgaacgacagcgggtgaagccggggtagcgctcgcgctcctcgtcgatctcctcaacggcgtcgatgtcgtcgaccccgcgacgacttgcaagttttccacgggcgcggggatagggtgatgtcgagtgctcatcggatggacgtgcaagtcgaccgagggggaatccgtctgggataacctggaagacgctcgggtcgatcgggaaggtgtgaccgggacgggttgagtctgaggtgtcatcatttggttagggatagcggtcggagtggatagtcggataggggtcgagggggaggaaatggagttggtcggcgagacggtgctacgtgagcgggaagctgatcttgtcgtcggcatgtcggggtcgcttcttgctcctggtattcaggtcctgggtatgtcggtgagtaccttgcctgttgtcgtgcagtgtcgatgattgatgggatggtgatgatgacgatgttgaggcggtgaccatgatcatgataacctcggtcgatacgatactcgatttgaacaaaagtttaaggaggcgaccgagaagtgaaagcttagtttgttgacaatgtggctgagagttgacattgaatatgacacgtcattcgagcgatatcgtaacgatgtcatgctgacatctttcttgaataatttgataacattcaggccgctcctccactttgctccgggttgtcaccgatgcccgaggatgggttgtcgcccttttttgatgacgtagagacgtcggaatcagccaaacacttgatatcgacctcgatcggttacccctattcactcttcctacacgtctctatcgcaatcaaaggtcgacagtataacagtcccaaatctccgttgtaataattcttgcgttgatagaccagatccaggcaaactccagcagcgaaatcccggcatgacgtctcaaccagaagacaagtttgtcaacctcgcggcttttcaatccgtaagccaccccgaacgccacccatggcatccctcccacctcactgatcttcgtcccacatctatccttgaattcaacctcgacctgctgataggtttacaacaaggtgtacgaaaagactttcggttcgcccccacctcgagggggagaacattcgccttcgaacgactctggcggtacgggaacgagaagactggaagagggtcaagtggacagtcaagatatggatgcgcaggatagtgcacacgaacgaggaggaaaggccgaagatagcaagagagaggtggtggaagatacgaggcgatcaggggatgagggtctgagcgcggccgggaggccagaggagaccgaggttggggaagagaccgaacggtcagagatcaggcaacaaagcgatacaagtctcccaagggagaatcccgagcagactgcttcaacaagagagctcgaatctgacagcgataccgactcggaagacgacccctcggattccaacgagtctcaggctgaatcagaacccacgtctgaaactcctcctcatctcccacccggtgaacacgtcatttcctccctcgccgatgttgcccggctgatcagtcagccatccagtaagcagccctcgcgatgaagatcttcttcctcgatactgacgactcggctggccatactgtaccttcgttttgtgagcgtagtcaagaacgtcatcattctcgccggagcgggcatctctacatcggcaggaatcccggatttcagaaggccaatcccgagtcccacgtcatcctccttcaagcgcaagaagctaatattgcccatcttccccgcgtgtcccgcacgaaacagtccagagactgggttgtatcataatctgaaacgattcgaccttcccgtgccagaggcgatattcgatatcaacttcttcgtgagtccagcctctggtcgattcggagtcgtaatatgaccggctgaagcggtcgagctcaacgctttctctcggtcatcagcggcggaaaccagaggtgagaaggctgatccccgagattggcaagaggagatcgttgaccactcgaggggttcgtctagccgttttacgtattgtgtaaagatctctacccggggaaacatctcgtgagtcaccctcgtttgaggtcctggttgagatttcgatcgcaggctaaaccgcccctcacgatgtagccaacgcctacacactactttttcaggttggtcgttgtcccgcgccaaggggaaactccggactggaaaactgatctgaggtcgctttcttaggctattagaggaaaaaggaaaactcttgcggatattcactcagaatagtgagtcgtcgctgcacttgacccgacacgcgggacccgctaagcaaccccatgggcggacagtcgatacgctcgaacggatcgcagggatcccagcggacaagatcgttgaagcgcacggatcgtttgcgacttctcattgcatacaatgccggtctgaattaggagagaaggagatgagaagggcggtggagcaagggggaggcaaaccggtaaggtgtgaacagtgcggagggttggtcaaggtgagcgtttgtctttaccgtttcgtgctttaatggatgggctgatgtaatgatctgggtgaacagccggatatcgtcttcttcggcgaaggtgcgttcggttgaattcctcaatcttctccccccggctcaccaaccgggtccacaggtctaccagagcggttcttcgagcgggcagctagggtaagcaatgtatatgccgcgtctaaccctctgatcgctgagaacagagttcccgaattaggacctgccaaaatgcgatctgctcatcacccttggaacttcgttaaaggtatattccactcccatggacgaacatagtaacgaaagctcacttgcttcgcctgcgtcgtcacaggtgcacccattcgcctcgctcgtagaccaagtcccagctacttgtccacgcttgttgatcaaccgggaactcgtcggcgaagcgatgagcaagtgggatgatgggttccgtttcaagaacggatccagagattggttctacgagggcgaggcagatgcgggagctatggaacttgccagagagctaggatgggaggtgagcgcggctacgctgcacatcaggagaccgcaccgggtcgctaataccacacgagactcagacggaactagaggacatggtggagacgcaacatagcgagctacgcagacagtggggtttgaaccagggtggaagtaaacagtctgcagagacggcaaattcgcctgaagataccatggacaagctcgcgaaagagctcgagcaggctggcatataaatccagacagaatgggattattcatacatggagcatcgtgtacggaacaggttggcagtcaaatcattagtctacgtcgtaatccgaaccaaattctccgcatcaatccgagtccgtcatgtcatgggcgatcgcccgccgtgagatcgtaagcgagctgcagaatctcggccgctgctcgttgtcttcctcctttcgacatggccacagtggcgtattcaacgcatcgcgttttcattgcagtggccgcctcgtcggtagcagtcctgccaatcacatcgagcacggtagaggcgaattcttgagcgatgataccggtatcggtgtagctacgaataagggaacccagtcagctgtatgaacgcttcgatacgattcgcaaaacggcgatagtgtcaccttcccttctcgttcccccatccgccgttcttgagcctgtcgaagaaaccaaatcagcaagacttgtagaagtggtagctatagcccgtctgaccatttcgtcctaatggcgaagtcgtagcagtcaaaccacgccggcaagaggacttgaggagttccggtactgaattccaaggcaaatcaggcttacgcgcaaagcccgtcattgaaagttgtgctcacgccatggcttcgtggtacgagttggatcctccgtggttgactgaacaacagatgtgacccgtctgtagtacagccaggggatccgcttcgagccacttcacgatccgaagacgacctcccgagaccaaatcttgcaaggatggatccgatgtaacgtccgaagacgccttgctggattgatatttccacaagacctgtacatctttgcggacattcatgatctgcttgagagcgcatacaagctccgcagcatacgctggttgaatgtcgaatatcgagccgaggacgattaggatggtcggtccacccgacaaccaatccgccagctcgggatctttcgatttcacgggctcgacagcttgaaggattggtcctacacaggcgatattgggcgggatgatggcaggtaggtcgagttcgggcgtggtcacgatgtattctcgtaattcgttcggcgcgtccctgtcaaagacagccaatggccagtccataccaaaagctttgcgtgccttggcgatgggactgcttttgaggaatagacccatgataatggcggctcgtagcgagatgatgatggcgagaggtatgaggtaccacggaagcgggtagggaaaagccgtgccgacgctgcaagaacatcatcagctgccagctcggcatcgttggctactttcagttacctcgaatgcaacttaccctccccacatccacaacgccttggctccctgcagatgggccacatgctccttgaccgtgttaggcgagaggatgactgtcttttggttcttccatcgacatgcatcccggcctataagatacagcgggtcgcaaatgacaaggtcgggtctgatctcgtcgatcaactgtccaacacgctgaatctgccggatagcatcttcgggagtccaggggagcaggatctgaggagccgacccaagagccttccacgcgccgaaaaagcctgtacaaatcagcgttcgacgagaggaaagtcagcttggaatcggggggagatcatccatgtcccttgctggtttcgtacccggttttctcgtctcgaaggatcggccgttgctcttattgaacatcttgagcatgctgctaccaccaatttcatgaaaggaaacatcaacgggctttccatcaacaagctgagatcgattctcgacctccttgactcgtggttcaagctctgcgaacgaggtgaagtgaacttccgtaccgcctttcgtcaacagttcgtgtagaacggcgagctgaacgtttgcctgtccatactcggagctgcgaagattgcggcccaggtttattaccgtttatcaagtttgttcgagccatctttgtatcgtgatgacctgaaaatacgaactttgtgagaagcatgatcctcggcggtcgaccagcagagtcggcctggtaatccatcgttccgaccgtgtacgtattgggctcgttctcctcgagcgtttaaagaatgcgtaggctttgcagcgacttcggaggaagagcagatggcctatgatttagatgaacattctgatactcagtcaatgaatattgagctactacctcgatgctacgatgatttgaagaagtgttcgttgggcaagtccctttggatcctttgatcgcattcagctagccgtgaggatgatcattccgccggaggaccgaatcatgccctaaaatgagtcacgtgatgacctatcgactgacatactcatcaattagtagagcgccaatgaattatcattcggggcgtcatccatggcttacctgaacagtcgagtcacgagactacgttcttctcagcatgtccttgtttctagcgtagccgcatacttttcggttcgtcggcagcttgcaacttttggtaactcctggccgtcgacagatcgcttagactgaaagtgatcggccggaagcagatagggggccatgacgctcggctcggcgattgcgacggtctgttcgccagctggtcgtgtatacaagccgacggtcaagacgggcaagggcgagtgatcatcttatagtctcagaaggcatgctcgccaactcgcacgccgtcaatcctctaaaccgaaacgtccactacactgtatctaggcagatttaccttcgcattgtcagccatggcaggtactccgagacggtcgactcgtgcggctaggtcagcatccaaaccgtatagcgagtcagccaatcggtcagacaagtccgaaaagccgtctgcacgacgacgtgcagctgcagcaaaagtcgactcagaagatggcagtcccaacgcgattgccaagaccgaagacggcgagcagagcgagactaagcagctggggtcatctaccggagccggtaccctcgatgacaagcttgctgctcgcaagatcaccgcctggtctgcgaacgccacgtcctccccatacccagatttcaagcaccctacgccggaagagtgtcgagttgcatacgacgtcttgacccccatgcatcaggccgatgtggacaaggagatgcaggacccggatacaccagaaacgatcccccatgtcctggacgccatgatcgtaggattactctcccaggctacaggatggagtaacgcgaaacgggccatggccagcatgcgcaagatttatggatcggtattcgcctatgacgacataatggcgggcgggatggacaagctgcgggacgctctacagcccggcggactgcacgtcaggaaaagcggattgatcatggggatcctcgaacaagttcggcaggaacatctggattggaatctcgatcacgtcttcgagatggacgatcaggaagcgatgaaggagctcatcaagtacaaggggatcggacccaaatccgcctctgtcgtcatgacctggtgcttgaagaggaaatcgttcaccgtcgacacgcacgtgtacagactggctggattgtggggctggagacccgagaaggcgagccgggacaatacccaggcgcaccttgacgccgtcatcccgaacgatttgaagctggacctccatttcttgctcatcgcacatgggcggacgtgtccagcgtgcaagggaggagcaaaggttggacagagatgcgctgcacaagatcaaatgaggagcaagttgagatagtgaaagttgacgtcgtcgacacggggaaattgtatagcgattgttgccgcctagatgatcatgatgatttgctcccctgcaaggtacctgcccgtcttggcgggacgggctgggtgagcgttctgctccctcgtggttcttaattctgccggggcagattcgggcggacgagtctgtagcaggttacttgtcgagatcggacgatcgaccgagctacttcccgcaaaacaggcgaaatcccccttttcgagtccggaacgcgagttgagcagataagggaatcctcgtcgagcgagttgttagcgggaaatgatccgcgttttcaatgaatcgacgtcaaacattttgattccgttcacgttcgccgcccgaagcgccactcgatcgccgacgtcatgcctcgtcagacggagattgtttgaagtttggactgttctgcgcatagataaaaagggatacatggaagggcgaaccagaacaaagatggacccttcgaaactccaccgattatcatcctcaaacacaagcgcacattaagacaatgccgggtgaccggtaccttgggttacgcggccgtgagcatcgcgctgggcttgggatgtaccaaggttctcggaatcggacgcaataaggaacgtctcgctgatgtcgccagcctaggaagtaagaagcgggtgtttaccaagtcgtctgaggacggcggggatatggccgactggatcaaggagcagaccaacgggctcggtccagacatcctgtacgattgcctaggcgtgggcggtgacgccaatggcacgatgaagctcatcaacaccgtcaaaacgggcggatcggccatcctcgctgccggtggtgccgagggagatttttcccagacgtacgccgaggctatggtacaccaggtcgccatcatcgggtcgacctggttttccggagaccacatcaaagagctcgtggatcttatcgacgccggtgtcattgactttggggacatcaagcacgaattttaccccttgaaacgggtgaacgatgcgttcaagtttgtcggtgacaggccgggaggttccgtcaatgtcgtcgtgcagccgcagaactagatcgtgaaccattatgcttgtagttgccttcgtaaaccatcgtgcttgtaatcgccttcgcttggacccggattgactcgaatcgtggattgatttatgtcggccaagctgtgaacagcatctgaatgatcgcgagctcgatcatcaggcaatgcagtgctatgggcatcgagggtgaccatcaactcggagatcactgcaacggacgcctcaatcaaagtgaggctcaagaagagagtgaggacgggggttcaggatccttgaggatgtttcgtgattcgcgacagcggccttaaaacaacagctgtgcccatgtctctagaaattctgcgctctcagtgtatgcctgtatcgacgatccgcttgtgaccgttcgagggtaacgattgatatgcatcaggccgggttcggttcagtttgtaaagcgaaccgccagtcgagcgaatggtgcgatgcgaattcggcagtcgtgagcttgtattaggaggcattcgactgccagccagcaggcgcagtcaagttccgaaggcaatgagcagtaaaactatcttataactcgcaaccgtacccagtacaacttgaccctatggcatcgaagcctaggcaaacgattttgatgaggtgtccagacagcctcacatacgtcgatgacgcccaatcaggcaatgtccgtttttttgtcgccgccctggggactgttccgtacggtctattgcggttcacggcggcgggtttcgaggggagcgggcgcaaaaccgaggacggagccgacgtcaaaggtcggggacagtgaggtcgaaggtggaaatagaggtggggctgaaggtcgggatacaaagagcggaaatgcgggcagtgacgatgatatcgagggtcgtgaagaagccgtcatgtcgatttccacggtaaactggtcacctacccagtcgaactcatcttagcctgttagcctacctcccgtttccacttatttccgcctatcttccaaactcacagggtctacgaggtcttgcaacgtccgccataatatttagaccgtgtggtcctgtggcatctttaagaattcgataagctgagttgtctcaataacaaccataaggtagtcatggcttaccaaatagacatatggaaagggtctcggcagccgcaataaagtcccgatcgaatctcctgggaattgcggcgatctgaacgacctcccatttgcttgcatcatgataatagcactccttactaagttggactattcagcgcgtgctcaatcctgcttgtgtattttaactcaccggaaaaatttgtaacctgatccctgacatgctccgtgtgtctctgacggaagctggttgtggtcatcccattacagatggtctgacctgtctcagtatcccgcttgcagatcctggagtaaatcccctgcgcttcgcttgtcttgcaagatgtacaggctaggcaggagtaatcgataaagggatccattgtttccagcgcggataggagccaccagctttctaaagatagcagtaccgccacgaccatctcgtagcctagagtgttttcatcagtcagcgtgtcttgggccgatcgagcggaatcgggcgaaccttgaatcgatcggtcatcatgtatactcatgcgcaggtattccgagactacggtattgccgtaactaaccagcatgggtccttcagcgggcctttcgactcgaaaaagatgacctcctttggctcgggactgggctttgtctttagtgttgaggatcgatgggtataatcgccgagcggcgaatctatgaccggcgtcgacatcgcaatactcctggatcaacaatatcttctgtctcggtcgcgatactgtctgctgacggagctgcaaaggttttctgtagtatatagaggtctcatctgttgtgtcgcaaaagatgccttgggaccgacgtcgggcttgtcatgccgctatatgaatatctgttacatctcgactcttcctctgtagtgccctacttgctcttgatctggtgatgagcttctctcatgatacagctacagtgaaggatttctatcagattgtctgtgggatggtccgaggtcaacttcgttcaggtcaacatatcctgcctgatcaaatcgatcacgttgttcgacggtagcgagctgatgtgagatgggcacaagcgacaccttccgagcgagacacggggaacgggagagactgaatgtccggaaagtttcggtggtctttcgtgtttccatcaatcctcacacaagtgatgcacagcagtcgacgaccttcgtcgatcctacaatttgacgcccggacttcgtaacggcgtcatcacgcgtgaccgctgttcagcttctcgatatcgggggaaccgctgggctgattgtgtctgtccttacagtagtcaacgtctttcgaggtcccgtcgaaagctcacatatcataggttatgtatgcggccattgcaagcacgattacaccatcacatcagccgggatctagtccgacgatctatgagtacgttctccgggggatcatctgctgtgctaacatgaaaccgcgaccagcgagaggtccgtgcgtcgtccgatccatcaacattcccgattcagatttaatcggccgacgtaggtcgaagcccgggtaacaaagtgcacagcctaaaccgatccaccagagcacttcctttcgtgccatcgtgtccgatgaccaaaggacctttgggactttcacagaagtcacccgaaatccgaaagtcgggccatttcgtcaagcgacttgagctagcattttgaaaggttaaaaggcatacaatcctccttcacaccatgctcctgctgattcgccctctactcatgtctgtactgctctactcagatcacctttgcgcacgatgagcaccgctttcgaagtattgatggcagctcaaaaagagcagccggacctgcctcagttcagaagtcagaaagccagcagagctgcgcgaggaggcgggtcggggaagacgctggctcaacatgcccttgtcaggcagaaaaaatctatcagggcaagtactcctcctcgcgtaaagtatgtaggcatggccagttcattatcgggttaacatccatcttcaactcagagtgactcatcaatgaccaagctcaatccgctgtggaccgtcaacctcgaaggtacgcagcggaaggctgcgctctggagtgacgggaagatctacaagatgctccagggaaatcgtttcgctgcggcaaagagtgagtgttggccaacttgcggcgcaactctactaactcaaagacctgcagaactactgccgcgacaacacgacaagcctgtctggccgcaaccggccgcctttgtcgccaagaaccgagatcgtctgtacaagtgagttcacgcatatgccggacacgcaactggcgtcctgaacatgaaacacagttactgggggcaaatgggacttgacaaccaagtcgtcaggctcttgtttaatatggacctcccgactgacaagatctataaatctggttatgcgccgtatatgtgtaagtgcttgcgaactgcgttgctgccccctttcttcgccgccgctcaacacaatttctctaatcagtgccctcggtgaattatctgtcgtcgtttgccgactttccccacgcacaatatcaatacgagggacttcgttcgggagcgatgaagttgcaacagggtgattcggcggcagatttcccgaaagccaagtctggcaagagggatgcgcgtgatgaagtgcttatagaaaaggcaggtcgtcttccaattgaaaagatcgatatcgaggaacctaaaccccgacctcccaggtcaaggtccggctagcgaagctctacaaggtcaaagtgaccaatgtcgaaggcatcatggccgcggaaaggtctattggaggcaaggggagaaacacggtctcgaaagacatgcgagctctgacgatggtgagaactccacgaattgctccgtacatcatcgctatgccgctgatatacccatctgtaccttagattttggtatttggtattgaaagtggaaggctaccgctggaaaacctcattgaaaacagaggaactgagagcaaactctacagtgggtgtctctactgagccgtcgttgagctttcatcgactgcattcgcatcgttatcagatcagatcagggatatcatggtaaactatcaacggtctttgaagacaaagtcgaagactagcaccgagaaggtcgagaagcccaagaaagtccgaagtccagaggaatcgattcgaatactcgcacgagagttcgattttcccctcgccatcatcgttcttaaggatcactatactgcagcctggcacgacgataaagaggtgtatcacgagatctctaaaaagtaggcatgaagcgagaaggaacgcgcgcgcgtagcaaagtctctggtatcacgtaccgttgacatgccaaccgtaaacaatagcacataccaaaggtactggaagaggatgattcaattgacgcaatggaatcgtagtctatccgggttacagaggactgtcgaagccagaatcgaagaccagctataccggtgagtttaggaaaatcacgatgcgtactcaggccaaccatttgaaaatctgcgtgttctaaagataccgacgcagcttcgacagttccgatgatcgtatgctagcagcgttactttctcacttcgagcttttggatcctcaagtgacgtaaaagtggccatcgggcattgcagatgccttggcaaaagcgataccggggcacttgcctcacgaattcaagctacgattcgacagcagagggttggaattttaccgagccctaaaccttcgtgacgaagatcgggttagcattcgagcgcgcagggaggaggcggcgagacaacgcagccaatcggcacgggacttcgagctctcaaaggcccacgtcagcaacgacgagtccgatgagtccggaaaatctgaagaatttggggaatctgacacagctgaagattccgacgggttcgacgatcccgaagacgaggcgattgtgctcgatagcgaagggagtgatgccgattttgagattatcgactagagcagctcgagctttccatttactttatgattgtgtcgtgctttcggtgccgatccgtccgagacgacttttccgcgtcatgtatgtcgaaactcgatgaaaacctatgcaccaggtcatgacgagatagcggatttgggtccggtctccttgtacttgaacagctccgtcattgcttgctcacacgggctagcagcggaccgtaccgcgcgggtcgattgtcacggggtaagcgccatgcctgacagcctggaggtgagtctggcgaaatacggttagtgataaattggggtcagatgttcgaaggggtgcgagtcggcttctatttattgtcatcgctcgcctcgcccatcgccttttatacacgaccaggcctggcaatggccgagccaggtgtcatctctcctacctcggtatctgggtagcctagcttgacgagacgggcaacgttcatctcgggcatgatgttgatatggattgcaagttgaagcacgtagaagtagccggcaagagattcgaggggtgcatctccggaatgctccggaatgattcgccctttcaaatggcctttatgtatatgagtgcagaatgggcagcgactacaatcaacctccatcggtcgagaggcgtgacgtcggctatcgactagctagcgcgttggccaacgagtaggagcagaagcaaaatgttcgctgttgactgatagaaaccgtaaatcactttcgctgacaaactcgctcaacggggattctcttgtatgctcatcgtcgggtctatctactgaacaaatcgcgagcgtgtctatttggcgaccttctggatctcggcaccacccttggcacccaaagctcgcttgatgtcgtcgtagatcatgaactgaccggcggtcaaggtaccgatcatgaacagacgggcaccgataccctacgcataacgaccgaacgatggaagcatgagcgtccgatacgaccgcttcgagctcgatcgagaaaaaggctcacggtgaacaaaccggaaggtccaagctgcttggccatggtgataagcctggaggtggttccctgaccgggctcacccttggttttgttgattttggaaaggagggtgtcggcgggttgcgagatctaaaacgcagaagcaaatcgatcacatcagcgaccgcaccaagatcggaagcagatctggcgatactcacgacggcagcggccataccagcgatcaaacctccgagcaagttgacggtggtcaactgagatccgacgagctggtccttggtctttccgctagcggcgatgatcttctcctgggcgacctcgaagacggcgaacttggccatggtgtaagggacctgcttgaaaaggatgggtccgaatctgcagataaaaagttcgggttagttccggctggtaagtgggtacgtgaggcttcggtccgcggactgacccggcgtagaaaccggcgacaccctcctccctggcgatcctggcgaaaccgggcaagagaccgttggcaaagctgggctgggagaccattcgaattcgggtagcctccaaggggcacaaggcgatgtcggcgaagaactcggcaatggccgaagctccgaggtagatggcggtcctgttctcacgggccgagtcgataccgacggtgtcgatggcgaccttcttccagaactcgtatcctccgaacttgagggctccctggatcgagtatccggcgatggtaggtccgagaccggtcaaaagggcaccagcaccctccttggcaatgacctgacggaatccgctgatcataccctacaagtcgatgaccagacgaggcgaggatgggaaagtgagcaaagacctcgcgatgtgctgacaaagggagtagcacggtaagactgaccctgttgtaaacctcgggctccaactggattcgggtcttgacgacatcgacgggggtcaaagcacctatgatgatgcgacgatcatgatgcaaagacaagaacggcgaagcgaaaaacaagatagacagtaagtctcgtgtgataggggtaatgagcgcaatgacactgaacgtaccgtgggtgatggcacaaccaagggcaccagcaagggcgaacctgcgagtcacacgaaacgaataacgacctcagcaagaccgtcaaaccctgtctttgacctccatgcgacactcacctggagtaaaggtcgacaccggtggggttaacggaagcggtgtccttgacgatctccttggcgtcctgcaacttgttgtaggccttgtcaccgtactggttggagagctgctgacccttggccttgagctcctcagccttggcctgggcctgggcggtagcgttgtcaatcttctcgccgatagaaggagcgaagaaggcggacgagaagaaggggttggcgttgtaagttcgggaagccattttgaaagaaaaggaacttgggggtgtgagtggtgtttttgtgtggagtttcgtagaacttggagaaagaagagacaccagttcgaggttgatgtgatgattgaatatgaggaatgaggtgatgatgatgatgtcgaccaggagcagcgaggttgctaggtgagaggtggctggagctggttcgctggaaaacggcggcccgagaagaaaaagtcgggagggagagacgcgggaaagttccgtaccgcgggtacaaagtgagcatcggaacacggtcaaggacgggattaatcggatcgcgtcggagagatagagtcggttcgtcacgtgatcatgatcaagtgaaacaactgcgtgatccgtcatgttctcggctcgccatcatatcggccttgatcatctcttcactcgctcatcgacctgcacgcggtcgatacacatggtctacttgtaacagtggtagccggcgtgccgagaagcataggactccgttgtcgctttgtagtgtatccttcatctaacccacgtcacaagcgcgaacttgccgcagcattcgacgaacgccctgccgccagtttcatccgtatctagtcacatgcagccttgcctgctagcccgcggtaaattgacagctgattcgcctgatcttgagcatcattcctgaaaaaagcttcctttgttattgccggccagcaggttatcggcggacacagaaaactcgagtatttggttcgatggttgcgctgacagatgaagcgtctcctttgtgggctttgcagccaagtaagatatatatagagaagcgagattggcatcaggcgattgtttgaaatcacgttgcctcatccagatctgcctcacatacaaagcatcatgaacgccattgagtacgctcaaactttctcgggcgcttcgaactttagccggatcgggatcgagcgatctttaccgtacgactatctgggaggtgtcaacaacgaccaattatctatcctgacttataattctgaagaggaaaaactgcagcaaggaccttatggggatttcctcaatcaagccaacagcgatctcatctctgttgttactactagccattccatgccgccggagacaaccacgattccgaatcaatcacagctaatcaatgggatggatgatgcacatgactctgtgattcatgtggcccagcgcgattggcacttctatttacagaggcggacgacagagtggagacattggtacgacacggagcgaatcattgagagccgcgtcgcagaagatatgcgaggcagtgtcgattctacggaagaggccatactcttccgactcaaacaagcttattataccttgcttgttcaccaaatggcaccgcacgccaaagagtgcgttcctgtcctccagcagtacgacgagcagcgttatggagcgatagagcaaggattccaggttatactcagccaaggccaacttcaggcctgggaccaggatttctgggagagcgaattggcagctcgtgagaacatcgatgacaagaggacctgtctcgtcagcacgataggggcccttgcaatctctcagacgatcactcacagacattttactcaccctatcaacgttatcatttcagtcgtatttgcagatctacttcgaaaatgtcggagcttggaaaggttgtgtttactgaatgtcggacacaacctgtttttggaccccccttcatcgccaccaaacccttggatcgttcccgattccggcttccatgatgggggcaattcggatgaagactagaacgaacagaatctgtttcaccaggaggacaccaatgatacctttgaagtccgacgtgttatttgactcccagtttgtacccagctgatcttgttggatactatgagcaatctatctagaccgtcctcgcttcgtctgggatcaaattgttcctgcgactcggtcgcgggaaccgtccccatcgcatcttccgaattcctcgcgtcggctcaaatgtcagctgtctttgtgcaatacatggtcattagcgctccggtttatttcgatcgcaatgtgttgctccgtgcagtcctgtgtcacctctttgaggtgacctttgtccggctgtatcttaggcgattacgagcaacaattttccacctcgccaaaaggaggcaatgatgacataagaggctgttgtgcataggggatcactccgtagatcgctagatttgattcttttgaactttgcgtattgtcagtcatcacgaatttttgtgttgtgagtgcgatcgagacgaatgatagatctatcaccaagtcccttgtcttcttgtaggaggccaaggcgtagagccgagacatgaaatattatggtgaatgccagtcatggcgttacctattacctagagaccaacttcggggagagtaaccagagccggttggatggtctgcgagggggaccttgtcatgaagatgttcggttcgtgccatatcgtatgattgaccactgtcaataccctccctttgtttgtttcgaagagcttctcaagaggcatctcaggcgtcgcctccgaaccggtctctgtcttgtgtgggagcccagctgacgagagcctgcagccaccacgtgcttgtggatcgtccataaaaggtatttcaaaatgtttccattcagccgtcctcgggccgtttatgacttgacagaaaactgccggtgttattcacgatcatgtggctcattcacctagttctaatcttacaagaagctggaggctcatcagctgaagaggccacagtccactttcggagcggatgttgctcaaatcggagaccgtttcggtttcgatgaaacgaagcagtatttgacggcttggccgcagaatttctaccaagacaagttatcatacctcccggaagaaaagagatcagcccatatcatagcaatgcttggagcgtcagtatcatcgcaagccgcgagatacccccacctgcctcgcccatcggacgagactgtcaggcgcctatattctttttctcatttggataggccgccgtcaggaaagactcggctcacttaatacaggtctatctttcaccgatacgttcgatgcagtgtttgccagacgcaggatacattcaggaggtacgacttgacaaacctagatcctataatggtcatttgatgaagaagctttgtgtcgtacgtgtcgagccatagatgtttccatcgctgcctcatcaaactggctctgaccgatatgtaggatcaaaacacagatcgcagattaaaacactcacgatcggttgggtgtctccatgatgctacaatatgaatggagtttctattgatatcgcactgcccttgtcccatacccgggaaaatgaaatggtccggtttgccatgacctcggaattaaattttctattgtagatcactcggcccagctccctggattgactcatattacgaccgaataattcctacccgacctggtacccttgttctggcgtccaagagctacattttcgacggaatcatcttgtaggttggattcgtgtgtggagattcggtacatgggttggcatcaggatccacacgtcaaagacgcacgtcgaagccctacagggtgaccttgtgatctatcaaaggaggtctccgagaatggagctgagaagcttgatgtcagtcctgtggcaaacgcgactcttcccgacagagcctcctcgtctgcattcccccctccttggcgcagacattgaccggaaggtctcattggactgtgaagctccgcttcatcaagcccccataccagaaatatagataagagcgacaacttcagttttcctccgttcaggtgtatcaacggcttgagcgaatcgtaccgacatcaaccaccagtcaaccaacctatgacgactcttaccccttttgacgccttggcacaaggagacgttaacttcccggacgattccttgatctggaaggctgaagaaagcggtgatcatcagaccctctggtctatcagtatcgacgaagactacagattgagcagcgtgtcgaacctcgggccggaggaatttccctctaacagtttagcagtgtgtaaaaaattatatattcctggaaagcaaaggtttagagaaaggaatacgccgctggaaaacggatcctctggtccgatagagatatcgacaatctctgttacagccgatctgatcagtggcatgtccagttcaccgacggctacgttcgtgccagcgccgtgcggagaccaactcgttttcaacagggataaaatgtccaaggagctccggtttaccgacaccagtacccgctttgcgcgatttttcaacgagcaagcgcgactcgagcgagctctggctgcagcgattgagaattggtactgtgaccaagccgtaacttctatagttgcggacagatgcagcaatattgcacttcatcaagaacgccacccttgggacggtggtctatcgctcgcgacagatttctcctacgaattgggtacaggacgggatttgccagaaccgcttagcaatttgctgcaatccgtgattccgaaaagaacgatcactctgggcaacatcgtcgctcaattttgcacgacgatcttcctgctgtacgtttgcgaagagtcagaggtggcaagagagaaaaggctggtcatgaaacgcatcctaaagaatttacagggcgcaaggaggatctacatgccaggcaatctgaagaaactcgatccagttggtagaagctatcctgttcgtggcagggaatcgatccgagagagctgtagtcaaatgtgttccgagatgtcatgatagaaatctcttgatcaaatcgtccatagtcgtatagagggttcgacctgagcgacctgaacggccggaaggatcgtctatcatgttttgtctgattgaatcatcacggtcgctcccttgaccctggccttgataacgcctctttgacggcaaattcacgggcaaaacatcgcgttgcagtatgcaaaacaggaccgcatcgttggctgcttggcggaattgcgtgagataagcctgtcaattgtccgcctcgatcagagtcatctatataagctctaagtactcgtagggaggtggatcgtgggaaaggacgccatgaagccactcccgaattcgcttccgaacaaagcgagtgaaatgctcccggatatctctttgtcaacagcaagcgtttcatctttccctccacgcgcgtcgccaacacgccgaacccttttgttctctctgttcgtaccgtgtacccgattctccttttgttctcggctcggatcgtaccggcccggttcgaggaatgaattcgaaacatttatgaaggagtcgcggggccgggcacgtgtatacctcgatgccgagacaatggtctcaaaggagtgctcgtgggacaaaatgcagcagcaaggagggagacgggaagcgaagatccacctgattgtgggatcgatcacgtcaccgatgaccgagagcgcgagcgcaagcattattgaacatatactttcggctctttgtatcgcgtttgtaatttgtaacgtcttcattgttcgagcgaacaatcgattttgatcgacattggcttgtgaatgaaaactatcgcctatgatatgttgtatatagaagtcaaacagagacctcgacgacgtgcactcgcgaattcatgatttctgacttccctttcgccccagagtatcaccatcatccttgcacatcatcccaaaggttgatctagtcgacgaaaaacctggaccgtcggaggacctccaatctcatcactcgatactgcacacaactgtcacgaaccataacgacatcgatcccatcaatctcgttggcacttccttctccactgcaagtctatctcccgatcgatcgatcttgccgacctacagcaccgtatgctttgatcgcttgcgcgtccgcctgccatcaatccatcacgaaacgcgtatcagtcgtgcgcgcgactgacggacgacaagggatccccttgaacagccaagcgatcaaacgccgaacgtgctagctccatcacacataagattctagcaaatcgcaaaaactctatcaaaagtcggtcatcgagatcgagatcatagagacgaaatcgcccgagctcgacctcaaaccttcgataacgtgagattctcactgtccacccgtctccgtaaagcgaggaacccgtacacacgtttcgataaaactctcctcgcgagacggcgctagcatcggtgccttcatcagaacctccggcccgccaagtgacaccgacccgttaagctcgtggcttcaccggcgacacagctaccaggttgaagatcgtgatcagccaaggtgagtgattcgccacggcgagcgttgtacgaaggcctgttccccttgttatatctcgggatcggctcctccctttccttgtctcgatcctttcgcccgcatgacccatgtggagccgcccctttggatcatacgcttgacaagttcaaatagctcacccgacatcatctgcgcatcttctagcttctctcgaggacgttccagtaacaagcctgatcaatcatcgcacatcacgatgtcgtcttcaaacgacttcaactatggtctcgttcgagctttcaacatccactcgtcttccgctcaatcgacatcacccctattcacgtcgacccccttgaaacaccccagcgtagctcgtcgaaccacctcaaacgcgagcaatgcttccatcatcacgctcccgaccaaattctcccgtgcacacgtattgcccgtttcacctccggtcccccatcgacgagcgcctcgtccgccggtcaaatacgtgccgcgaaatcactttcgatcgaaccacctcttgtcgccacttcacgaacctggtaggaaagggctctggactgtatcggaggacgaacacggtgaacgagaagccgaaatggaagaggcgatcaggaaatctcagtgcgcggcgttcgaagaggcgttgatgcgatggcaagccgagaaccaggaagaagaggcgcgaccggcatcgacggccgataggttcgtagacgtcgatctctacgacaacaacgccttttcgtgctcgacctcttgcacgtccgaggacgtgtcgcactgcgtcaccccttctatcgagcacgacgacccgctggaagacgtctttctcgtctccgcagccgcttccgaaagaccggggcgcgcctcgacttgctcgttcgagaccattgcacgcgatgaggatcgtgatctattcttcgtcccatcatcgtcctgtcgacctaagcctgatatcgacgctctggacttgaccgctcatcgtacccgacaagatacctgggagtatggattcgcactaacgcccagaacttcgagcgcagagaggtgagtgcgcaactgcttccacaattcggcattcgagctgacgaaacgtgtcgttcagccctgaacccccagcatcgagcgaagactcgttcggttctcgaatctcgccctcgcgcgagctgttcaacccttcgacggcatttgcggacgcttcgagacggccacctccgctcgacctgaagaacagcctggcatggcgggtctcgctggaaccaaattttctcgtcctgggttcaccattctctcctactccagcttcgacccgctcgcaggcacaggacgcgccgtcgagcttgctgtctcccatctcccttgacatcactaccccgaagaacgccattggcttttcgctgacgacacctcctcccctctcgcgatcttctcgctcgagctccctctcatcaaccggatcttcgacccaaccgatcacgccgagctcggtaactggacagacgtgcgacatgctctcttccacgtttggcaatttccttatcagcgctgaagaggaccccaggccttacatttccttgcctcaagacgtggcttcacctgcaatggcggaaggagagtccaaggacgaaatgcgtttcccgctccctcctttccgactgagcgaggagcttcctcgcacgccagctcggcccaacaatcgcgacgacgcgatccgtgcacctggtgcgccttttcgcccgacacatcgaccagtacttcctccaccctcttcgtccgccttgcaaaaattgatgggcatgcgatctaacaccctttcccgacctaacgacccgactcacgacgctgcccgctcgagaataagtatccccaaatcatgtggtgcccttcagatggcgaccggcttaatctctcccgctccgaccacccggtcaaacgagtcgtccgcctcggccagctcgaccacgtcttcggcgtcatcctcgtcgtcgacctcgaggagatcgcttcctcagcggaaacccctgccgatggactggatcggctatcatccgaaggagcatcgcatatagccaatccgttgacccgccttggtggtaaaccgataccgacaccgacaccgagtgcagagcaccgacgaccctcctcatcttctaccttcgctttggaaacggataggcatcacgatcatacacgaccattgaaacgcaatcataaaacgctcttatccaggccattctcgcgattcgcacggacgataccctagcgcgtgttcccctttgacgtgtcgttctgtacttgtttgtcatcctcgtacgatccaacgactttgaatgatttccctgtatcccacgaccttgctacgaccgcctttcctaatctcgctgagctcgcttgtaaccatacgtagtcgatgccacatatgcgtatgatagttatagatacagctcgtcctatccgatgacacgtacctcgcgcttacttggtaaccccttgtccgtcccccgccttgacctttttcggcctctccccaaagatcctcgtacccaccctgaccccgctactcccctgcttgacggcctctgtgaaatccgcactcatacccatgctcaattcgaggtcttgttcctctttcggtgcgccgtcgaccttcttgctcttcaaggcttggacaagcgcgctccgagtggatttcagagtatcgaaatccgggttctttcccccctctgcggtagaggcggagagagcgccgatggtcatcaacccgtgtagtttcaacctagggcattcggtaaggatatgtgtagccaggtcgacaagttccgaagcctctgggttgggatccggctcagacccagcggcgggggagaggggtttgacgccggacttggcgtcttcggaggaggtgttgatctggatgtatacgttgagggtggacgattcgggagtccatttattgagcatgttggcggccttgatagaggagagggtttcgaggacgtagagattggggatcgctgaggacaaacgggttagttgtcgatcctgcgtcggtaagcgggagtctacactcacatgctgcttgcttggatttattactctggagagctccaataaagtgccacttgatatccgtaggcaactacccataccgtatcgcaaacaacccgtcagccttgctcttctcgagctgctgcacgctcaatcctgactgaccgaatgagccttgtctaccatctcctggatatagttctctccaaagtgtcggtaccctgcatcgtacaacgccttgatatcgctcgcgggtttgagtttagagacggctaccaaccggggctattcacggtacacggtcagctcaacgatcgactagtcacccccaagaagacagggtcaatgctcaccttggttcctccttgactctcgacctctgcccaagcatcatcgatctctttctgtaccgcctcgatattctccttcaactcttcggctcgctcgggtgtgtagtcgagatcgagcttggcagactgttcttcgtggtcggacatggttgtcgtgcgggatcgtgttgcgtaggtctggaaatgcgagggtcggcagggcgtggcgatggacggtctgagcaggcgatgtgtaacggcgaacgatctcaaagctaatatcatcaagaggagcgacgaatagctatatccgatgtatatcgagagtcaactggcaactggttgaagagtaagtatatatctcgaatcgatttcccatgtaattgcagctcgaagagtagagcgtttcgatcaaaagtgacgtagtggtgcgaattcaatttcggaagtaaatcgaaatggttccggatgcaaattgactggctttgacaagtcgtacacaatcgatacatacagacggtatggatcgtcctcgtcgggacagctgactgacgtgatacgctcggcagcaggaaccctctacctcaagtatcggatcccacggtgtcatcgattgtacatgatctcatcgattcgaccctctcgctcacgaccattcctcatcgccgtcgatcccgttgatcgtccctatacctcggcggcgacctgctccgatctcgtcctgctcctctccgattgccgtcgtccctatcccggtacctatcgcgatccctatcccgatcgtcgtaccttccgtctctccgctcgtctcccctcgaacgtccgtcattatctctccgctcgtcgtcgtacctccctctcccgtcctccctatcccggtagtcggaccgcggaggaggtaaaggcgctcgatctccataacctccatcccgggcttcacctgtagctgttgagcgggaagaccctccaaacccgactcccgaggcgttggctcccgtccgctgttccccacccggattgttgttgggacaatctgttcaccctctgagcatcagcgcgccgcaacagaaacagaaacaagcgacaaagagaggcagcagactcgcctcgttttagatgaggtccaccgcagttgaaacaaccttccgattgaccgccagccccacctgacggtccaccgggcccacgacggagcgcacgatcccatccttcttgcgtggtatcttgatccttcaagtgagtgtactattaggtcgcacgagggggtaagatcaactgatgatcctccggcgagtgtaggatgacgacttgcctttgaacgagatgcctgttatttgcgacatgaagaaaaaggagaccgatcgtcaaatcccctctgcgggtcgaaccgaaagccaaggatgatgggtcgacataccttgccgaaattcttgacctgcataatcttgggcaacagattgatgtccaccgccgactcggtctttccactgacgcgtctcttgagaatctcgtcgtcttgatggaaagcccccttgtggtaaaacttgtccatgaaccccctctcctccctttcctccatcttcaactcgcgcgtcctcctcgcgtactcttcgtcctctctcaaacgttgcgcttcgggtagggcacgtcgacgttcgatctcggcgcgttcggattccttgacgagggaagcttccttgtcccgggcgagacgggagagttcacgtagtcgccaagcgtcgaattcggccgccgggtcgaggtcgtccgtatcgtcaacgtcgggagcgttctccgtcgtctcctctgtcgagttcgagttcgcaatttgatctcggatcaggcctggtattcatcgccctccgccaaacttcggaccgactcactcgccgccatctcccgcttgatcgtctcccccaacagatccctactctccttctgcctctgctcaaactcggcttctttacgcttgatctcctcggcttctttcagttcttggatctcacgtgcagtaaccgtctctcttgctcgtctgtgtccacgagtgtgggggtcggatacgaaaacgtacgacaagtgatggagggagaaccgggtcgggcgaggctcagtgagtttccgtggaaatctcaagtcccagtctagaccggcactcgggactcacttgggtacgaaagtaggcctgatcataacctttggcttctcctcttcctcctcgtcatctgaatcttcttcctccccagaatccgtctcgtattcagattcttccccggtgttggccccttgaggagggacgggtgcggaaccgggtttccggaaggtaggtcgggcggtaggtggggcgtcggattcctcttccgatgtagaccctatcaggaacgaaaggggaaagaggaatgtattcgtttagatcagagtgcccggtatgcaattccaaagcacggcgagaagagattccgagattgaactcaccctcgtgctcgtcttcatcgtcgccttccactcgactgatctcgcgtttcccaccgatcaagacggccccatcgtcctgcacctcgacgtccctgagtgcgacctggatgttcttcgggatgattttgggctgcgggatgaccctccccgcacctccagcgaccaatccggctttactggcatcaccgcgagtatcatccttcctccctctccctcgggctcgcttgtcgttcagttcgacattgttgtcattgtcgtcgtcctcttcagaggaggattcgtcagaatcggggatgggcgccccattagggagtttcccacggcgataccgcaaggcttgtggtttgggcacgagcggggtgggtccgggtgccatcctcgaagtcgtcgtcgctagcgttgtcagtatgtgtgaatgtgggctgcatctagcagctagtactgtacaaggtgtacaatgcatataggtgtatgagtggatgggtgtgtgtgtgcctttccgttgtttgtcacgtgatttacccagatttcccaaactcccaacacacaaagttcaaactaagaggaccatcatgatcgatcatacatgttcactcgtcaatcactacgttgacaacctcgtccatacctacccacgcaagcacaccggctcgtagtaatcaggatgataagcaacagtcacaaacgacggaacaaatccgaaccctcgtcatcctcgtctctccgcgtattcgaagagcaagacatgtcgatccggctcgccaagatgcaggatgatcgggaaaaggacgacgacgagctcgacctcgaagcagccttgtttggcaagaaacggaaacgagtaggaagaggatccaggggtagtggcaaaggcaagaacaaggtcggggtcgagggcgacatggaggaccagggggatatgcctggagtgttctgggaggacaagggggacgtggggatgagttccggagggaatgccgacgaggtgcgtaataaggtcgaacgagaagccgactggactcgtcttaatcgacaagacgttgactgatctgcaccttttggggaacgttcacgctcagatgttttacgaggacgcacccttggcggaagatcgggatgacgaggagcaagagatcgatttcgagcaagacctcgaagccgactctgatgacctcgcttctgatcaagacgatcgggactcttccgactttgaatccgatgccaatgtcgacgtccttgacgatgtcgacgccgagcccacatccactcctcccctctcctggctatccaccccgtcctcctcgaaaccctcgaaaaagcccctctggcaagacccctctgaccaccaggtctcggtcgacatgtccaccgataatcgactccggaaactcgcccgttctcaaccccctgggacgagcagtacggtcgacggacgtgggttgcaaagtaaactcagggaacagtttgaaaagatgcaccctcagcccgagtgggcgtccgaggcaaaagcgcgtgcggccaaagagtcgaacaggaagaagaaacagggcgacaagggctcggggacggtcgaccctctccaagcgttgtttgcgagcacggcgtcgttcgtggatacctcgtcgagcctgacgaaccggggtttactacccaaaggtgcgctcgaggtacgacggctcagggatgcgaattaccagaaccggaccgtctgggaaggaggaaacgggaagaaaaaggttcaacctcaaccggggagtgcgggcaaggggaaaaaggagacggcggcgtatctcgatacggggatgatggacgtcaagtttcacccaaaggtcgaggtcctcgccgcagtcggggcggacagacggttgaggttgttcaacgtgagtccataagagcgcccgtgcttaccctcctcacatcgacgcggagccgttgttgatttccgacactttccgcgtaacagattgacggacataccaactcgtccctccttagcttgcatattccctcgctacctatcaaatcgatgcaatttcacccttccgggacttccctcctcttgaccggctctcggcctttctactatacctacgacctccgatcacagcgctgcctacgatccccaaaaaaccttctgtccaacgcctcggcatcggacccggggagcacgtacgccatggacaagaccgtctttagccccgatgggagcgtacttgccgtcgcgggcaagaggggtatcgtcaccctcctcgcatggggtcccggcggttccggacaggtcttgaccaccttgaaatcggggaggacggggggtgtgcaggacatgatgtggagaaaggggggcaaggagttatgggtcctcggagaggggagcgaggtcgatgtttgggatctgggcgagaggcgatgtgtcgctcgatggaaggatcagggtggattcggaggaaggttgttgaaaggcagcagaaacggggattactgcgccgtagcgtgagttcaaaatcgtgtctcgccctcacctccccagccatttgctcacatttcacatattaacggcgacgaccgaacagatcgacaacaggtgtcgtcaacgtgtacgacgccaaccagatcagctcgaccgtgcgcacctcgatcgacgtgtccgagggtctctttgctggtgcttcaccccgacctatcagggagctcatgaacctcacgaccgagatcaccaacatcgccttcaaccacgacgcacaaatgatggccatctcgtcgagcaagaagaaagacgcctttcgaatggtaagcatgggagacgagggtgcggaggtgcggcaacgggtgatgctgaattcgatcgccgttcgactgagcagttccacttgccatccgcgacggcattcacaaattggccgacttcatcgacaccactcggagttgttacgtgttcagacttttcggcagggagcgagtatgtcgctatggggaatacgcgaggcaagatcctgttgtatagcgtcgagcactacaaaccgctcggcgcctagacgagtcaaacgttatggcccgtctacgtgcatacatcgctcgtcatggggtcgcttgttcttcgttattagacgtcggtacaagaatatggatagtggtacaggttcctatcggttgcccggtcgacaggggtctcggcaaggggtgttcgtcattcattgtttcgctcggctaactcgtcccatcacgacagcctcaaaaggtgtcgtcattgtcaggacagtcttgcgttcggtgtctcgacgtctgatgcgacaacgatccgggtcaataattgagactacaatggtgcacggcctatttcgactcactgcgcagttgtcgcaaaagacttgttcgcgggccagattggatttacccaattgcagcacgttggtcgacttggagaagagcggcgagtctccgttttgagatggaccgggcgagttttccccgtccgtcatcgacgtatcgccccggaatcgaggacagtcttccatgtcgtgagcgccgctacagagcacgcacgtaccagcagatgcttggcgagcagaggtggctttgttgctctgaagttgctcctcgagtgcggtgacttgatgctcgagctcttcctctcgccacatcttcgtctcgaccaaggattctagctcctcgatctcgcgtgttagctgcaagacatcagcggagaggttagcactcgtcgatcggagtcgaagctcaagcgcagactcacgtcggccaccaccttggctttgccggcttgtaaggcagtgcggtcttcttcgagcctgatgatctgcttcctcagttgagaaagctcctcctgtatcaaacagacatcagcgagtcgttgtgtgtagtatattatgatcgtccaaagttacctgcacagcaacctcccctgcgtcatcgcccgcggcactgctgcccttctcgctagccctctccatgggatccaatctactctcgatggctgattgcagagcctcgagctcctgaacgagacaagggttttcagtacacgctcgggaatcagtcggtctcccttcatgcccacgtaccgcctggatctgcttgttggctatggctaactccttgttgtcgtcatcggacgtcttgatctgcgagctcaaatcctggatcgtctggtaaagttccccgttttcggattgcaggtcatcaatcatctgtcgcagtccgatcacctgcttctcaagatcgctggcaccggcagacaaccttggctttcgactagaatcagagtcggtagagccaacgcgctgaccgttcacggcggcagatggcaagcctagttgatgcttgctctgcaagtcctggtatgctgcctcaagagtctggtgcttggcctcgagtccgctgtgcctgtgctgaagctgaacggagagaaaccatcatcagcgagaacctgcgagcgtgagggaagcgttaccaacctcgatgagttgggtctcgacgtccgagctgtcgacagattgcttgactctggctttgagctggacaatctcttccttgagaatatcgcgctccttctggaccgaattgagcagaccttgcgccattcgcatgttttcgagttcctgtcaagaaatgttagcatcggctagtctgtggccgaagaatgattggccattggctcactgcaagatcaagacggttgttttcaatctccgcttgtgcccctgctagagttttggcgtggtccttcagggcatgctcgaggtccgctactcgatctttgctcttcgcaagctgttctcgtaatccagacatgtcgcttcgcagttgggagacgtcatccttgtgcttgcgctcgttcgcaaggaacttttcattatttttgagagcaatctcggtctccttctcgatctgcacctgctgctcctcgatctgatcttccagactagcaatcttcttctgctgatgctcgacctgcgccttgaggttctcgttttcgatctcggctgcggtttcggcctcacgagcaacctcaaacgcagacggggcaggcgcattttgcttgcgaagcgcctcggccaccttgtcttccaactccctgatcaagctgtcttgctggaactgcttgtgctgagcgtcccctagtttcttttcgtagaccatttgcagttgctatcagatgatcgaggttagcacatgttcgcgccaacgtaccaaaacactgaagaccactcacttgagccgtctcgatcatctcttgcttcatcaaaagctcgtggtccaggcgcttctgcatgtcctccgcacgggcttccgcctccttgacctcttgccgcttcgtcttcatcccgagttcatattcttcctctgacctctctttttggacttgtaactctttctttgcccgttcagctgtagtctctgccgtaacaagcttgatcttgagatgttcaacgtcgttcaaagcggcatcgagctgtttctgagctccgctggctttcgcttctagcttttctgctttgattacagcggcagatgcttcccgggaggtaaactcttgggcgacggtaagatcattgatccgttgctcttgctcctttttcaccttgacccaatctccagtcttgggttcagcttgggccgcagcgagatctttttgtagctcttcaatcttgttcaagagctcgacattgatcatttgttgctgctccgcgcgttgattggcctcggacacctcggtagacgtgttcgctcggccgatagcaccgtatttgctaggagaaggcggaggcggcatcgagtcgtgtaccacggattgccttcccgtcaccgacatcctgccactcttcagggccggtttgggtgtggaattggcgccgccgatgctctgccgacttttcatgcgcgcggccgacatgctaacggtccggctaggagttgaaggggtacctccagcggtgagtcccggtcctccgatagattgtcgcatagggcgtggcgtagctccatttactgaatccgccgtgacgtccatagctctctgagcggcgagtcgggatcccgtcaactgattcgccttcatcccggccaatcggcttgctctcgatccctctgtcagtctaccttgcagagtagcctggctgtcaacaacgcccgctttcaggcgttttggcgtcatcgcattctccgttgtagatcgtgcgagttgattgactcgagtagacctcgctagaggaggcggcatcatattatcatgctgatccgactcgggctcggagtcctcttgtatgaacggcgtctctcgaccggatgcccctgatgcaatagagtgcgcaggagtagctctgcctgaaggtaaagcgggagtggctcgaccggcagtactgtttgacctgaccgatgaggcgacagatggcgctcgagcctggactcgagagagcttttccacaaacgcaaacactccgcaattgggtggacaagaaaagtattgttggctgaagtccaagagaaacagattcagcgtcaaaatcagtaatctcttcattctgcttgctttgctgttgcttacccagccacagatccatcattcttccctttgccagcgaatcctgcatccagctcgatcccagcaaaggttccgaccttgccctcgataggccctatatatctgacgaccccctcgaaatttccgagcgacgcgatacaaacgtgatcgccgaccgcaggctgaaactcttctcgtcgcggtgggggcatggcacgtctcgacctggactcggtcgtaggtgttgtcgggcgactcgtcgatgccgtgcgtgcgattggagctgtctgggcgctaagggacgatcgaggtttcgcagtaggagtacggaaagacgagctcgtggcacgggagggtgtagagctgttgctttgagcaagtaccgattgcctgagataggttgacggagctcggcgactggccgggactggtgtcctcgggctggacgtatccggactgcccataccgaggctgacgtttccatacttgctgatgaatccttctgttcctgaagccgtcttggtagatccgagaggcaacgagctggtgctttgagccagatctccggaatggctctgttccaagcgggacggtggtcgaacggagtgcgacagacttgatggcggtctcgaccgcatcacatcctgaaacgcggcaccagcttcgggatcatccaacattcttctgcttttagcagtaggggtcccagcatttgatgctccgccgccgaaagatagcctcttgggggttggtatggccgacattgtggcaagttccgcttgaacgtcggtcaatcgctaactctatgctcgcgcaacctttccgtattatttgtgaattgaagtgaaggtcaccgtgcagccgtggatcaatgcgaggcagcctgtgaagcctacagaagagttccagataggtgaatcaaaagcctgacagctagatcagcttacactaaccctggcagcatgggacatgaccaagtctgaacgctcagacgatatgtttactcttgtgcgttgttgacatttcgacgatcccgcgaggaacatccagatatatttgattccgcggtgcacaacaataataatgctccttcgaatccaatctttgatacagtctcttgctgctcggctagcaattctagcaaaaccatgctacaacatacaacgactcgcagatactcaattcaagcatcaatggggtggttgtttcgagcgaacgtcgatcaagctcaatcttgacgtggtcgcttgtcttttcggaagatctcgtgtctcgcgcccttcccggacttggcagcgatccggtcatccctcttgatgcgtcggctgaaaacacacaggtgtcatgctatcagtagaaggctccatgaccgcaatatcgagactttaactgacttcatattgatgctgttctcctgatacgtcatcatggatcctcccgccaagttctgcatgcttcccgtcattcgatttgcgggcttgacgccttgtccgaatcgctgtttaccggcggcattgtcgataaagtcataggcgtcctcctcatcttccatctcgatgttgaccttttcggtctcgttgagaacagagccgaggagttcgagttgatccttttgggtcttgaagacgaggtccggcaaaagatcaattccgtgcaactcggtgatgatcttgaaagcataaccctgagtagttgaagctgatcagcaagcaggtaaaagaatcccgtgtgagaagaccttacttgatcgacgaggaaaccctgacgcttagtcgaataatacatctcagaagtgtctttcgagacgagagaatagaaaaaggcgttgaatccttcatcgtttcttctcttggctcgcaagatacgccctacgcagagattacgattcagcagcagcacagatctgcaactcgtccggactgaccaagtcgttgagcctcttgtcttcgagatccataatgggaagagatctgtatcaaacaggtggcttcagggagatcgatcgatgtgtctccgacctgtgcagaaatgagtgtgagagcggtccttgtcagccacatggccagaaccaacttacctttgacaagaaaatcgtattcatatttgggtcgtgctgaaatcgtgccagaatacgcatacgctctctttcgtcggtaccaccgtgaatggcagccttgcccagcttttgtgcgtattgctggtagaacgatatcgcacagtcagaatgtggtgtctttaattacgccgcgccaaaaactcaccatgagcgaatatacattatctgagaagacaatgattttgtccccgcgtctctcgtgataattgatcaggaactgacaagcctggaacttgttggggttcatggcttgcatgacgattcgagctcgacttttggccagcaagtattcagcatagaattcaggcgtcatcggacaccaaacctcggcacactgagaaagacgaagtcatcagcgttggtcatttgtaaggcatgtggattgttaacggacctggacgttcgcaatgtgtcccttttgtgccagatccatccaattggcttcgtacagctttggaccgatgatgtaattcaagtcagagattctatcgtcctctcgtaccagagttgctgcaaaaccgtgtcaatcagtcgacaaccaggtcccggacaatccaggcgggcttaccggtaagaccgagcttggcatgtgtcctcaggctctcgacgcatttcctgaaagctgtggcaggcgcaacatgcacctcatccaatagcaacaaaccccattctcgactcttcaagaagttcatgaatgtctctgacgaatgtgatcgcttccccgtgaaagcgaccatactgtagacggaaatcacgattccagctgcaccggaatccgcccccgagaactgcaagagatacagcggcatataattaactcccatcgtgtggaaagttgagtcagggccacataccatatcagcagactgcgaagtaaagatggaaatctgtttgtcctgaatattggtaaactggatgaaggcctgtttccattgttgcgcagagacgctaatggttgacgcgaatattaggaccactcgttttgtgccgatcaaaccactcacgccgatgtgcacagcaccaacacgctctttttgatggtacacgcggcagtgataccaaccaaggtcttgccggctccacaaggcaggacgatgattccggatctcgcacgactaagggagacaagcgattttagtactggcctttagctcttatcaccaaatcctatgccttacccgtttccaaacattttgcttaacgaagtttcctgataggaccgaatgaccgtcatcggcttcagatcgatctccaaattctgattgatgttgtcggctcggaaatcatattcctccaatacgggtagaccgatctcctgacattgtcgtttaactttctgcaaccgatcatattctgttaggtggtgaatctcgcgatgcccgcctgatccaggggctcacctccatacgatccccatcgatctcaaaggattgaacctggtcatcttcatccatctcgtcggctgaaagtcaaataacgtcagctgtttttataacatagtcggaaagctatttactgacctcgatccaagccgatcacggcacccaagacgtcgtcgacggtctcctccacggcggcttgctcaacgctttgcccagttgcgagagcgttcgcccgccgggcttccgttgtaccagggatgaccagaccactagcagtcggtttgggagccgattctactccatggatctggtctgcagcatcctccccttgcgctcgtacgatccggcaggctcggatttgggtatcagccaacagtcgctgtatcatctcagggacggatgattcgaggaaataacggttccgtttgaggacgagcttgacttttccatatgcggcggtccatcggtgaatatctcggataagagattgcggtagaggcgtctgtataatatgtgagcatgagcgaagcgctttgcacccaagaggaacgccctcccttaccttcgacagtcgacttaggacctcaacgatgtctttggtctctagtccaaccgacatggcagcatacagcgaatattcgttaacccgatactcgtgaataaaggtaggtctgccaacttcgtcgtaagcattcatggctcggacagccgaatcattctcgttcgcaacatacctcgagactggttcggcgatagcaaccaggaaatcttgggcttgctcggcgataggagaaaaccgctccagggtactttatcgttttcacacatggtcaatcgattgtaccagacacaaacataaaaaacgattcttacattctgccatgattgtcaatccacaacggcctggccgtgtggtcggctttcagttctaagccgccaagatccttgacaggcctagacttccaggcgagtagctttgtcaagaactcgctacccgtgatctgtctcggaccgctatcgtcgctatcgtattcatcctcattgacttcctcctcgtcatcgtcaaacattcccctcctctcagactgttcttgtctggggggtatagggcttgctacgaccgccgcccgcttcctcttgcccgtcaccggattttgtttcaggtgggtgaacttgcttgatttagtgggctttggattcgccttggtgcgggtccgcaaacgaggggtgtcttcgaagtcagagtcaccgcttgcgaccatgacttcgtcgtcagatgcattcgggtcgaggaacccatcctcgcttgacgacatggcgaaggatcggtacgcagagcctcctcgagacgcaatctatctctatgaggcaatcagacaacgtccagatagattactgtgaatcccgttgccgcagaagtgaaatgattgtcttgacctactgaccgagagattcctgtaagtataggaggcgatctgtgcccaatttgcttccggccatacaactccgatcgcatgactaatggtccttattacaacctggaagtacagattcttggaattgatcgcagacatatttgtcttcaccggcctctgcccctcttactacctcgagaacgacccgatccggcacccctcccacggctgcctctccctcgaccgttctcaccaccttcgttcggacagacgctggcccaatgccctgcttgtccacacttgaagcagtctggatggactaggaattcagcgagaaggcttgatccatgagcgtgcctttttccttacctcccgtttgtccaccaccttcatcggctcgatatccactacctccacccctgcttccgcgtgcccggtcggtatcagcaccgtccggttcgtcccactgaaaagatatagaatgagcttgtcgcacaacctactatcgagcctgcggggactgacctcgaagaatccacactgctctccctgaggtttagaacacgtttggaatgtcttgccttgatttggtccttctttctgaacagtcctccggacagccggcaagccacagctgcattgtgttccgttgtcggcttgacggccagcctgtcctcgcaatggagccggacgagactatgaacgtcttggcgttagggcactacctttcatagtgacggaagtcaggcctaccgaaggtcccgaagtcggtcggcggggcgcaggagctaccgctccatccgcttcagcccattccttcggaatgagaagagtaatcagccatggcatcaatagctagacacaggaggcgggtactttggaacttacgaaaaatccgcaaccatcgtctttgcccttgctacaagtccagaactgacggcccttgtttgcgccttctcttctcaccgtaagctgtattgctgatgtgccgcattggcagtcaggtgcagcaccgccgggatcgtctacagccgtcccagatattcgcggtcgcttcggtgcgggacctgttcggaaagacgcgtcagtcgggccataccgagagcatcctggaatggcctgctacgaaccctgatggtcatcgtcgtcatcttcgtctttgcgagtccgccctttgcctttcgtcgccgttcctcttccccgcgctgacgcgggctttcttgctttggtggtccccgctttgccacgacctcggcctcgtgcccgcccagtacctggtccgtcgtcgttaccaaaatcgtcattgtcgtcatcgtcgttgttatcgttgtggttgttctgattgccccgagccgggccgcctcctgctggtcgcccagcccgtatcgctcgtgccggctgctcgtgcatgtatcgctctacactctgtatacagagcaaatcgattgattcgtggcccaaatagaagcctctagtatgcacttacctgtatcacggtctcgaattgtctcttggccttgatataaacctcttgatactgcacgatactgtcttgtaacacctcgttcttggttgctacaccgtcgcaaatcatctgcatgcgatgctccgtctaaggtgtcacggcgagtaagcctttgtgcatcgtggcgaaaagagacttcggcactcacttctctccgtagatgcggcttagtgagagacctgtcgaatccaatttgattataaccatctacgagcccgattccgaggtcagacgggacgaggtatttcgctccacggtcttgtcgggcttcgacatattcccgctcgatgattttggcaatatgctccgctatcgttgcgtccgtgcctagcagatgcagtggagttaatgattgatggaacttggaatcaggctgtattcaacgctcttaccaataccgttcttgtccatcagtccaacaagatccgcctccgtcaggtaggccggactcgccgtttgtccatccttcaattcacaaacagagggcatgaactgctctccttgttgaaaattcggcagataggaatccgcccatttgtcatatggatagacttccaggtaattacgagccaggatgaccaagccagatgtagaaaacttctcgcctgcgatttcgatgtcgacattggtggattgaccttcaccgtttgtagagcaacaggccagaaacctccgggtcacaaattcgtagactctcttttcatccgcttgcagattacctgcgtgcgctgtgggatggatagggggatgcgccttgtcgttcttctgaccgttccgtggtctagcaaactcgccgtctacgagcctgaatatagaggtggacgatgagtctagcgtcccgttcgagcgtttgaatctcccatacctctgagcgaaccctccccaagcaggatcagcgatctgtttccttatcagactggtaaagtcaaagtctttgtcgaattgatccgtctcagttcgggggtagctgaggaaaccttgctgataaagcttttcggcgatctgaggcggacgcgtggtgaagcgttaatgatgtcggtcaacgagatacgaaaggaattgaaaacgggaaacgaacatcaagtatccgcttaggcgctagacggagtaaccgagacccagacttttgcagctcgacggtcgtcaacggtaagggtttcctgataatctcggcgtatgagcgactgtgaccattgtgacaacacctcacgactcaccacttttgcgtaggcttcgttttgacgtttgtgacctctgccattggcgattcgacgcacatctcatagagcacaactgccatttcgaaatcgaacaaatgtccacgagaccacttgaactggacggtattctcatccctctccagaccgactgaaatataccaaaacgtctcagcgacaaagttctgcacgcggaagtgttgatcgcaaacgaagccgagcgtggggtactggcaggggcctgtgtatgtcaatattcagcttctcaggcacactatcgactagaaaggatgtcgacctgccgtagctgatgactttgccgtcgagatcgggtaaacgttgttggagcgtcattgtctgtagccgggtaaaagcggccccaagtcgtaggtcgagcgatatccgggcatccaccgcttccgcctggcgtacatccagctcgaatgggttctggcacgctcgatggatctggctgagaataaggcaagattagacatctcttgcttgatcatcggctgtcaatctaaactcacgcaggaataatggcactgaatctcgcccgcttgacacgtaatctcgcgttaacctcacgacagacattgacaatctcttgtccgatgtgttcaccctctcggtcgcaatccgtccagatcatgagtatgtccgctcgtctagcttcatctttcaggttctgagctaccggttttagtttctacgttggttcagatgagccgtgcgttttctaatcgtctctgatcagtcaggactgacatcgtcaatatacgtctcgatgcgggcgtcaaatagctggaaggggtcgcaggaatgccatttcctgactctcgtttcaaaatcctgcgaacgtatcaggtcagtgtcacatgccatctgatatggatggattgcagcagcttacagacgacgtcaaatgtccaagcacactcgtcattgtgaagtcagcatgacagcggccaagaggtcctgccaactgataggagaagtcataattctgtatatactgagctctacttcgtcgctatgatggtctccgccatagagcatcagctgggatgttgatgctttcgggccaaacaggacgtaccgaagttcgttgtcctccagcgaggatctccgagatgcttttcgcgatggaaggcttctctgccacacacaagatcttcatggttgcaaccgctttggcgagtggccctaaagagctgctcgggcgattcacctagaaccgttatagcataaacgattggagcggtgaatgtcccgtcccatcttcctgatgctgcctagaggtcaattacgggtggtacctctggcattcacatgcagttattgacaggcagaagctatcgacaacttcatccaacttcgatctcggtcgagaggcccctggtcttcgatcgaccgagtgaggcgacgcgtaatcaacggaaagttagggtgattgcttccgcagttcggaagtaatcaccttagaggcggcgttgtccgagcaatcaaagtagatggtcgttcagcacttggatcccctagcaaaatgtctttgggtatgttgcacagaacagggtcgctggctgaaggagagcgatagaagtctgcagaataaataagcctagggagatctttttcgcggcaatttctcatctctcggccaccagtccgtgacgataaaccgccttcgcgaagtcctaccagaggtaacgctcctacattctgctcgcagttgtctcacagcaagaatataaatgagacatgacgggtcgcgtcgagaattgctcccaacgccatgatttcttgcggccaacaagggactagactctgaagactgaagacaagtagacctgaatttgtcataacccgtatccctccgtttcatcaattctcgcaacagctcctgcagcccactatgtatgtcagtgaaagtccacggtaatccggaactctacgtaaataggattaggtcacgccgaaatattcccagcttcaagaaggagagtagcaatatagatcaactccagggtgcaaaaacagttttacatggatacacttgccactctaggcatcttgctaccgcaatcagattctacgcagataatttgacggggcaattcctgtgcgaccatcgtcgtaactcagctcccaccatcctgcatcgtatgcggttcctctcctcgacaaattgtacgtcatgcccttcttcaacgcgaattcgtccgactctgcagcaacatagtcatatagcgccgtgactatgtcaaacaagcaagtcgtcagctatggttgcaataacgggtgccaggttagacatgccttgaccaaaagtgccgtgaatgggaacgctgggtcgagtctgcattggtggagcaggcggtgacgctggcgagtaactgcccggcattgtaggtgggttgaagggaaaccctggcgaagccacgtgcctggctgggctcgatatgggtgaagcatgttgcatgacgggctgagtagcaggcgagacgacgggcgagacgtaattgttcgcttgcggtcggtattgcggtgtgtttgatccgctctgcaagtgttctacgtagccggcgggaataagaccctcgagcgagcctccatgcacgtccatgcggactttggtccagccttgtccatcgtctggttcaaggatgtaaaccagtactccctctgcaaaatgaggaactctcttcagcgccctatcagaacgctcgaaccacctcatgatacatactctctacggttaattcgtcatcgtcggcagcctcgaaatcgaacagtaccttcgctctagcgagacctcctggcgttgcgctcggacttggatccgttgaccggagcccgttcagcctgaaagcaggttctaggcctccaacttcttcttcgatgacgggcgaaccgcctggggaagcccgtgctctacctagtatatctccgcttccccttcttgcaggtgtccctccgggggacactgggccacccgcgggcgagccgaacattgagatccgccttcctgttcctgtttccctttggataggcgaagtcaggacaggttgagatgtcgacgaatgcagtctgcttccattgcccattcccacgatacccgtcgtatccaggttgtccatgtcggtcatcctatgcggaggcggtaacactggcgtggcgagcgccagcggactcagtcctggtgctggactgctgaacgaatcgctcgaatgcaaccgagaggtgaaagaccgtcggatggctcgaagcgagctctcctccttgtccctgtccttggtcgaggcgatcgaagcgatgtccgagatgctctgggacgtcgaggattctttacgtgggaacatgtaagagatccgtcggttgggtatgcttgaagacgatccgccggtacattctgccggaacctgccacgtgggatgtgctcagtatcattcgccagcaggttatttaataacccggcaactcaccttgtttgcacatttgacgtgtacgttcgatccgcaccgtctgcatgtcgagcccggtttagtgatcccccaaatcgaagactagatcaagttgacgttgtttcatcagcacggtactggagccctccgatgatgcacgatcactcgccttgcagtattcgcaaggtgtaggaatggcaaacgaagcgctcttgaagtcgtgcggtttctgagcgccctgatcatctgccggtagcataatatcccgatattaggtgactgcgatatctgagggttgaacgggtgacgcagcaactcactgcccagagcttcctcgagtaatccgatctcgacatccatggcctccattttgagttgcgccaacgacaagtctttcaacgtgatcatcattgcctggcacgggaattgatgttcgcgcggtgcatcaggatcgtcgtccattcaaagatcgatcgagatcaaaaacaaggaatgctcacctcgacaatctcgtccggatctcctagcccacggttctcctcgtacgtggtcacgacctctctacccctcctcacttcgcccttccatcccttgaccaacccttcgagcctcattcgtccctcccgggccgtagcaagcctgttctggaggacgacgacctcctcccctcttccagggttaccgttcccatccacaggcgaaggacctaacccggctttgcccccaggttcgtcaaagcccaattcgtcccttcctccgagagtgatcgtgccctcctccagaaacccgggacaaggctcgaacacgctcttctgtggagcctgatggttgatcggcctggcgttgtattccgcgtacaggtcggaatccttggccgggtcgaccagggtgtgcgcctggacgatggacgaggcgtaattggcttgtgcggtgtaaaagtgtgaatacaccatcgaggtgtgggagagtaacgaattgagccttaatgcagaggagtggaacaaggtctgtagttcggcttgacaccgtgcaatgcccggtccgaagggtgtcgtccgtctttcttcctcgtcgtcctgacctagtgcttccgccgcttcatggagaccccgctcggtccgatcgtagaagacctctttttcccggttccccactccgagagcaaggacgtaggtattcctagcgttgttcttggcgaccaatgccgtgcggtaggatttgagtaatcgggggaggtgcttgtcgtctcgaggcgcgcgggagtgtttcgtgcgcgcctgatccaggtctaggcaggcttggtgatactgtccaggtacatgtcgcgagcaaaagtcaagtaaagatagaacgaggagcgtgaggcaccgtaagcgaggttgactaatggctacgagggatcacaactgagaacgactcaccttcgtcatagcctttccgacctccccctcgctcctctcgcgttcctcgaccaacccctcgacccagcctccgacctttttcctcccgctctccttcttctcgccgctcttccggagctcgtcgatgatctgcgcttggagggaatcggctaatcggaggtgctccccggatatggtctctagtgtcgtcaagtgggtggagagggaagtgaggagggtgctgcgggggaaatggcgtatcgttgtggacagattcatcggtagtagaaggacgagttgatgggagcacaagatcgataatgaaaggttatgatacagagtgggaggagcgtgtcagcttatcaacatgtacgcctcacattgcacgctatgaatctcacctcctcttctccaacccttcttcccatcctttactgctctcctccccaaccgtcaacaagacgacctttctctccttcaattccttttcccgcaacttgccgaccatggctttcaacttggtcccatactccctctctagctgaacgcgctgttcggtaaacgcgcgtaggtcggagtagagggatagatgatgagctaagaaggagagcaaggggacgggttggtccggtagggcgtgcggccatggatgttgcggcgttgaaggtgcgttgaccatcgtgtggtcggtgtcctacagtacgaccagagagctcgagcttgatgatcgtgtgagtgtatagctaggtctccttatatcccttgggatgtgtgcactgcagttcggcacatcaatctcgttcttgctcttggcaacatctggtaaactgctgtgcaagttgaaagggtcagaacgatatgcttcggatgcaaatgacgttaaccaggcaggtccggatgcaaatccacgtgatgtacggtcggatctccgtcgggagttggcgtcgtcgcagcaatcacagctgcaacggtggtgtctgtgaacatgctaaaggtcggttcggattgtgcaagtgcgaggaatatcccatctcaagctgctagctactaatagggaaggccgccactagaaatggtcgaaatcgcggtccccctatatgttcgcatttaatgccggcatcgtcatttcgctgaatctggacgcgacgacgcgatttgggtttgtcgctttgttcagctcgagacctggaatgacgaacacatccatcatcatcatctcatcattcgaacactctgatcgctcgtcactcgactacctctatcctcttgcgtcatcgcaatctcaaccagatgattatgttaaacctactatcttgaatgacgatatcgacaagctggtcaaacatggacctcgacgacccagctcctctcgtgatgacggcggagaatctctctcccatcctctctcacctctctcagctccagttcaacaaatcgcctaatcagaccaatctcccgctcgatctcccgctgatgaaatccacgctaaacttgttggcccaagttcaactcgaggatgagaggatggatagggaggaaaggcttgaaggcgccgagagggagacgaagaggtcgagatacttcgcttgggtcgggttgttccggacgacggcaagtcgcgatctcgaagaggaagtatacgtggtgatgttgacttgcctttttttcgaccaaccctgacatctcgtttcttgttttcgaaacacttcctctcactgctccgccgtcgcttcctattcatgcatcttcgctcacatatctcccgaccaatcgccatcaatccgtaccgaacagtacgcccgctgtctcctcctgcgcgtgaccaccctcagctcgagctccagacccagatctaaagacatgcaacgagcccgggaagaagatttcagacaaggggtaatcgagttgttcctgcctccttctcaatcgacctcgagatcgaacgctcggccgttggcgaacggtaccggcttgacaggtcgaaaaggtggtgttgtcgatatcgatatggatgtcgacgtcaacgcccatgcccatgcctctactaccgacatcaatggtgatccgaccctcgacgataatgccgatttcttcaagagacagacgaccacagaggaatgggagtggtaccgggttcaatacgagacgagtatgaggctttatgaagggtggttgaataccgggtgagtccgcggtcgaggtctctgaaaattccgcaagcgaatcggaaatctgactcaggaagaccattcttccgttgcttgctttcccccgcacatcttcggtgccgttacaccccgatacatcatccgatcacccagaaaactcgatcggaaatcactgccccgctcgacgacttttggcaggatcggcgagagattgcagaaatacgtcgaagaggttctcaaccgtgctgacaagctgcacgctgcaaaggaggacactttagaagtgctttctaacaaggctcagcctgaccagccacagaaccgattatcgtctcggtcagatggaagagcagtggaccaggagaaagtacgggaaggcgcagcaatgagctcagataaggagaagcaaagggcagatcatatgcctgtggtcgcctcacacgaaggacaggacgctcgttccctcccggctacagggagaccgatgaatcgcccatcctctgggccagctcggcgacctgccaatgtgcccgtaatcaaggagaccgacgcggatcgactcaagagagtgaggcaatcgttgaacgggggcagggatctgcaggataaagtcgaccggatcaggaaggtacaggtcgaagaggttctcatggacgaagaaccatttaagcaggaacgagcgagttcgatcgcagacccgggtcaagaggcgagaaggacgacaaggacgaggttctccgggcagggcgaactggaagaggcgcagaagaccgacccccgttccgagctgtcctttgcggctcggggacgacatactttcgaccaagagctcgacgaacgagaatatgaaccgtaccatcaagcccgtccgccccacccatatccatcttccgctcgacctccccgctctagcttgcccgctcgtcacttggatcgacagcgagaacggtctgtctcggtctttgttcccgacttgccaccgggcacgatcctgcgcgtcaatgaacgcggtgtagccgaagtcatgatggctgatcatccggtcgaccagatgcatggtaatggcaccatacgggacaatggttatgaatacgacgaccaggatcagtatgctgagcgagaaagcgggatggacgtggatgtgacagcagagaatatggattggagaggagccagctttttggatgaaggactggacgccgatatcgatcccgatctggatgttgacgatcgtctgagcacgatgtcgagaggaggagagtatcgggaaaactcgggaccagtctccgggcccgggcttcaaccagcgggataccgatgggctttgatccccgatgagcctgagttcccacgcccacgctccgatagaagagggtcgtacgctccttcgacgtctcgtatcgtctatccaggagacctgcaacggtctccggttctgccggcttatcacaatgcgagatcgatctcgatgcaagaacggcgctttgcgccaaactctggcttcccaccgagatatcagcaagcagggcaatccgaaagaagatcgtccgttcagccttctttcgccgctgcaaggacgaggtatatgacgcccattccccacgactcacgtgcacagtcggtgctcgggagagatcctaggaggcggcatacggatttcgttaggcccgtagctaggtcacccttggcgttgtcgtccatccaagcggaggccaggcagggcatcgcacgtagaaggcaagggtacagtttgggtggcgcggagagcaggttctcaggagtgaggcgggagtcggtcgcaaggcaggacgtcgagcccgtgcaacaaccaatggcagactggatcgataacagcttcgagcacgacgaatctccctttcatccaccgccaacgacagtcgtacaccatcctcgatccgagcagtcggtcaggccacagtctgaaagacaagcttcacagcccgtaatcaagcgtgccgccgcgcatgatgcaccaatctcgtcccgctccgcccttgtggcgaacgcggctgctaaaccagactcaccgccgaatataggcaatagtcaggtaccctcaacgaatgctcagacgaatcaggacggctcgtcgcctttcaggcagccattccgaccattcgatcaacacaaagtccttcgcaatccacagagggccaagcgtgctagcttaaacacaggcctgcacacggggcgacccgagtttcagcttgctggcgcgaacgagacaaagcagaccgagccgaacactcagcagggagagcaggaagtagaagaggcacctacggctaccaccagtgttcggtcggccaggcaaagagagagggacgcgatcgtcgcccaaaaggagaagtcgagaagacgcgcgagcaagatatttaggacctccgacgatgatgatgactgaaacgagctggtaacgaatctcttcctttgtctataatttttgatcgtaatacaaatagacgcttttttctgctaaacaatatcgatcttgtcttggcgtcatcgcacagtgctccatggactcctggattgcatcacaccatgcaaagacacacctcttcagcaggttgccctatcacttccctcacagtaaactcctccctctctacagcatacagactggaatcgaagttttatgtatctgacggttgccccattctgatcatcatgcggctcaatttgtagcagctgcttatgatacgtgcatatacggtcagcggacgcgcctttctgctctggcaaaggatttcttcacgtgtcgtgttggccctttgactcgatccggcagctagctgctggatcaaaggtgctgttgagccgagtgcaaacagccgttgcgaaagggatagcccggctcagaccaaattcctgacgttgactaatgccgcgaacactcattatatgctgtaagatgacctgacatgattatttgctgtaagatgacctgacatgttacaacctgcaccgtttacaatatcacgaaaaaaacgacatcatcaagggcgatctcgcagtgcttctctcgcagtttcttcaagaactccgtctgctgcatacttgtcgtccatcttagaaggtaccgcgcttcgatcgtggctcatatcctctagatcggtttttgctgctacgcgtctactctcaacagtacccatcccacccagaaagacggctgacaacaagaaagctagattcgcggatgcgcatgaagtaatcaacgacgacgccaaaaaatttgggggagaccggggacatgactcacatcccagtgcaaatccgcaacttgtccagaacccgattttcaggccggataggagcggggcgggcgggtattcgccgtgattcacggtgatcgtgaccggtccgtgcatctgatcgaccttttgctgcgcgatcgatgtgtagaccagagtcgcgatggcagtaccgaaagcgttgccgacttgcagcgcggtctgaaacagacctccggccgagctgtgttccgaggagagtgacagttttgatacaaaaatcagaccgacggcaacaccaaagtccgctccggcgacgcagagcaccatggcccaaaattcgttggtccagaagatagcgcccggcttgatgacagcaaaaaggagaggcgcgatcgctgtcatgactgctccaacgcagagcaagatttggccggtgatatggggaaccaagaaggcgatgatgatgttgcaagccaatccgctaaccgaagtcggcaagaatcgaagctatgaggtggggcgtgtcagtgcgagtgtttatcgagactagagcgacctgcaacgtaccatcgtctgggaaggcttaagatggaggacttgctggtagtacaagtccgtcaacaggaagtatccgctgaaagaagcgaaattgaaaaactatcttccctatcttcagccgcgatcggaccgaatatcgtgacgcccgactcacaatgaaaccataaacgacagacagtttccccttgccccgggtgaaaagggccagcttcaagagaggcggccgtttcagtcggttctcgatgtaccactcccagcagataaacacccctaggagtaggacagaaacgacgagcatggcaataatcgctgtgagaagccccattttagtaaaacaacgacgatggatttcaaactcgctcagctactcacaaggtgtccggaacccttgagatgccgttggacccgaggtgaagacgtataacagcatgacaagacccgctgtcgacaataccgcacccagaaaatctatccgcctatcggcaccaggatcggggcgtcgagaagggactgcccagaaggcccccaccacggggatgacggcgataccgcacgtgatgtagaaagcgctccgccatccgtggctgttgacataatcagtcagccaaaagccgaagttgcagagacgagaaagcaggtgacttgccttccactatccgccagagagccaccaagtagtacacctaccgcagcgcctatcgggttgccggcaccgtaagccgcatacatgatacttctccttcggccttcggggtgattctcggcgataatcccgatggatgacggcgcggccagggatgctcccaatcccgccagagctcggaggatgaaaaatggtacggcttgagagttcctgacaagaccgcaacctaggctgaatacgcaaaagatagacatgcccagcatgaaggtatatttcctcgatataatatcggcaatacgcccagagagcaacaagagacatccctgacgaaaggttgacgcatgacgccggtcaggtttcaagtcgactatcgcaagatccgagatccatgggagtggcttacgtatgatagcacatagctgttcaaaatccaggtcaggttctcctgcgagatgtcgaggtcgcggccgatgaccggtagcatcagcaacaccgattgtcccgccatggcggacaggaagctcgtcgacgttgtgcatgacgcaatggcgagagtagtgcgcaaagggggatccttctggacaatcgtgctttgcgaagaggttcgttccatcggatttagaaggaccggtcctaacggggtttctggaatggcatgaccagctgcattcacgagagattgcgactttcgatctgtttgagggctggtcgcgatcgtgcccatgattcagcaactacgaggtgttcattcaaacactgagatgctacgtgaggaataggtcttcgttctcctccatagacgattgtcccactcgtcctatcgtatatttatgaatgtaaccatcggatcctctgttggtcgccgctgagaagttgggaaaacatgccgaggtctcggcaactcgttcggcgttcaggggaagggacgggactcgattacggcatgatcgccgcagtcgggattccagttgcggtgatctttcgggtcttggcgagtacattgcggggaaccttcgaggccactttcggggcaactttcggggcaccttgaagcgaggcatagcttgaaacatgcatagtgtactcctttctacacaacgacccatctccaatacggaaaattcgacgtttcgcgatatcctggacgcgccataggctagctacatatggccaaatggtttcacctccacggtccaagcgagagcttcaatgttgtaacagtttaccatacaatcattttgagcagctcgggaaagcagggctcgtccgtgtagcttttgagatattctccagtaaatcttccatcctatcttccgtcatgtcgaccacgaccacgaatcagcaagacacaccttcgttaaaacaatctcttagactgatcactgccttgatccacacttcaccgcccgtgttttacgattctcgccgaccggctcttcgttcagtattcagttcccccggcggtctaagcggtctgggaactcccgtctcggcctctggacagggcgcaacgatagtcacccccgccgatcggttcaattccagagcacctagtcgccaaacgagtagttatgagtcgcccttgacggtacacgcccctctagattttccgggcatcagccccagcagccggacgcgcgccgtgtcccttgtcctgcctcaatccccttcggagaggatgcctgtcggcaagcttcaagtcagggacaaggctgatcagcccggtaaacatctcttgagacccattcccaagcgttcctcgaccatctcacccgagataggacatcatacgtggggtagtcttccacctcctcgagcgcctgagcaactttctcctccgacggaatgtctcgctcgattcaccttgtcccctcctacggggacgatggccccaaacgagtatgtgtgcgaatccccttctagtgcggtcgattcctccagtcccggaggaatcagatccgggctggctcgaccctgtgtgagccagatcgaggtgaccagtacgtggagcatgcccatgaccactgtcgatcgagtcgggcctcggctgtcgaaatgggaagaccgattgtcgctaccacgagaaccgagtctgaggcgtagcgtctccctgagaaacggaatccgggattcagagggttcggcgcataagcgcaattactctgattccctgcttcagattctcccagccatccagtcgggcatcccacacgagtctagtcggatgctgtatctcgctcatcgacctgcgcctcctgtgccggcccacgaggtacgaccgacgacaagacggtcaagaaccccaatcccttacagcatcggtaaaaaatctggcgagcatgaccgactgtcgaccttgtcccgtcggacctccacaggtagcctggcttgcgactccccgaaacgtggtagatccgcgagcgtacgcgatcttgattctcctcatccgagtcccgcgggtgagtccgagagtaagcctctaggggcgtgggaacgggtaggagaaggtgcttcggctacggtgaggtctcgacgaggttcgttcgcctcgatctggtcgacctctcggctagcctctgatgttcacacgatgaaaccggatggagatgccctgactcgagcggcagggctagatttggaagtggagggcgatattgaagaccttcaaacaacgaagaacttcgaaaatgatgacgaggtggacgacttcgaggtgttcatcgggtttgatgacatgtagccggtagagtcattcgtgtagaccaaaccagctcgctcgcgcttgccatgtggtatccaacgaattcaattcagttgaacctgacctgagagacctgcaacggtcttccatggactgtatcacgatatgccatgatatcttcctgtgtcccacttaaaacagcgatgaataccctgttcgactcgtccaacggctcagagtgcacatctcccgtaaagtcggccctccatttcgatccgactccctgatgcgccgcccagacggtcgggttttccccgatcgcgtggtgcaattgttcgtttctgctgacgatgcgcgaccaggcggagggtacatataaatcgccgatcttcacttccgcccgatcggctaattgggtattcgtcacccactgcatcacatcggggaaacaagatcgcagaaagacggtaggctgtccaacgaggacacatccataccgatgtcgaggcttgagcgggccggtcgaggccgtaaagtacggtccgtccaagtgccacctgcacatagacgatgcttctttgcggcccgatatctagaactcgatggcgcaccagtcttcgaaagggtcacgatctcggtcgacgagcttgagaaaatgacagatgaggtccgcgacatctcctagtactggtataccctctgtcggagtttgaagagtaagagctagctgatgcgcaagcaatactagctgaaagctctcgcttgataaacgatggaaagagatgccttgcctcgttccgtcaccggtcacttgaagctgtgcggtatcgccgaccgggtagaattcctcagcagctatttgcgtttccatggtagtggcttgattagaatggaaggagatcaaagcccgtcggaagtcggctgcctgcatggtggaaggtacacagatttcgacggtgtttgattgtcgattgacgatatcggcttgacggtcggccccgggatggcggccgaatgagtcatccgaatcacgtgatccatcgatatttcgagcggctacgtcatccaatgatgcaaacgaacacggtcagaccagccgtatatctcatcacgcacgatcacctttgatcgcctctataatcaaggacaacttgaatcctcacattcacccttttgataatctcgtatagatctttagacccatcatacacaactaatcttgacaccatgtctgaaaccgtcatccgcgccatcaacccgttcatcaccatcttctcggtgcctttcgctcgattcgggatcctccccgtaggaggtcgttcgactgctatcaagctcaagaatgacgaagttttcgtcctcgcttcgagtccggccgatcaacagacgatcgataccattaacgctatgggtaccgtcaagtaggtccttcatcccgaatccggaccgaggccgacgtgcgaaaggggtactgacttccggcctcaccttagatacttgttgacgcccgacacggtgcacagcatgtacatttcggactttttcaagctctacccagatgcccagtgtatcggacccgaaggaatttcgcagaagaaacctgacgtcaaatgggcgggcgtcatgggtgagggaggagagtcggtaacttatgggttcgaggacgaggtgagctcagagtcgccttagaccatgctgttcgtgacctttaatccgtgtcgtatcttcacccttcatcttcagatcaaattgcactacttccctggacacgtcaacaaggagatcgctgtgctgcacgttcctagcaagacccttgtcgaggccgatctctatttcaacctgcctcccacggaacagtactccaaatcgactcaaagctcgcaacctttctggcctctgagcatgctacagtcgggaatgaagaacgccattcctaggttgaccggcaaggacaaagggtgagtcgacttttcggattgtaacacagtgacgatacagtgttactgacttggaatttgcctccacgcagtgctatggcccgagactcaaaggtcgtcgccgcctgggactttgacaggttgatcccttgtcacggagatgttgtcgaaactggtgccaagcaggtctggctcgacgccttcaagacgtacctggagaagtgaacgccgctttccgacggatataacgacgacgttaccgaattcgaggcgcaatagggttgatgaagaggtaccgttccggagtcattaataatcgttcaataagctaatagatgcagcagagacatgactataatcgattgcaatgtctgccaagggcgtctcaggccactctgatgtgattcagataatcgtcacttcatccccactcatccgttcttccaattcccatgctttctcgtcagcctcggtaatgcccaacagatcgaccagcttgacctcgcccgaatcctctctctcataggaccagacgtaaaagtatttctcgcaaaacgctcgttcagctcgtgccgacaactggggagaaggcgtcatgtcccgccacgattcggtcgacgtctcggtttcatccctagtcggtcgttcgctttcaacgtttcgtcgaggttttcgagccggtttgatagattgtctccgtgtagacaatccggctttgttttccccgtggcccccttgcatgtcagcctggagctgacgacgctgatatctctcggctctctgactatgcgctgacacaagcggtgcagcggcaggaggagagcttgatggagttgagacgatccgtcttctcttgtgagatcctgttctcgagcccagcctggtcagtctatattcaatcgggcatgtgcgctgctgtttgtgaagctcactcttgggtaaaggggattccggagttggagttctcgccctgtcgcctaggtttcccgatctcgctacaacgatgactgtatcctccccttgcgagtcttcatcttgtatcttcatctgctcatcagatttctttcgaggttcggcccaaatcggtgtagtgcttgatgtgatcgggcttttttgctcggtgacatcaatgcgggcagcagattccgtgtcagccgagcggggccattgttcgacctgggcatccttcgtgggaacaggattagctggaagagagggtagcggactgagtggatcggcagtccccgaagaggtctcttctcttttgggtggagtcaacggaggggaaggcggtcgcacgctttgtagcgagcttatgtccaccttccggaacgggtctactggcgagtctggccaggtcaaagcctgatgaggctcatctagcgtgattgccggtgctatccagggcgaaatgcctggtatcggaggaggtatgaagtgccatgcccatagtgtctcgtagtcgcgaatggcaacattcgggcgatgctgatgcgcgtaaccgggatgctgatgttggcccacttcgtgatgagtgacgaacggagtcgggggtggaaatggcagagtataaccggtagtattccctgtatgaaagatgcgtagcatcgacaacagatcgtcgtcgcgttgttatagacctactcactatgtctgtggaaggttagcggaaccggatcccaatggcactgcacgtgctgtttgtttcgcggaggtaatggacgactctctcgaggtacttgaccccccgtccagctgacgacaccactatgcgaagtcgtcatcggaatggatctaaaaaggcaggaacacggttgtttcagtcgcggtaccgtaaaatatggctaagatcgcattgtgagtgcggaggtcgaagtgacgtactgagatccagcagaacaacaaaaggatttcaaaggaaccctgacagaaccaggagcgattccccttgtgcttcaaatgggagatctcggatcatggagcaactgccgtatcgcgagctgtagctggatcgcaaaagtcaaatgaactggcaggtctggaattcgacttgagcgaatcgaagtatattctgtgtacgctgtgaggttgtgatgtagtcggaagtgcgatgatagatcccgttcgtgcctgggagatcgaggggtccgctacttttcaagacactcggggttacgtcgatttgttgatcccggtcatcaaatgtaggaaagatgatgacgatcacctgatctcaatcaaaaggggggcgaaaagggcagggagagaaaggccgatgaaagggatcaaaggaaaggaaacgatgatcatcagagaaatccacccatcacccggaggaagggatcgcgtgtcatcaacatcgctcaggcgcaacggggcggtgccacgtgccggtgcgcagatcatcctgagacgcgcgacggatagccgaacacaattgatggcatcaatcacggtcgatgaccttgaataggcaggcgggtcgtgaggtcgacccgaagctgcgagtgagatggacatcaaatcggctctttgaaatggatggcacccttcgtgtttagtcgttctcctaataatcgtccgcctggccaccgacggtgcccgttggtttgccatgaccgctgttgtcaatttgatcgaactctaattcacgacagattcacgatgaccaagaacgaaataatatcgcctccatctctcccctctttcctgttacagacctcaccaaatatgacttcttctctcgtgccctgtccttcgtcatcctttcgtgaggggctgatagatgcgatggccagcacgaactgaacacacatcggcgtttgatgcgccttctccggtgtggacaatgcattcgacaccgtctattccggtgcggaagcatccaaggatatcaggtgaacatcccgtttctaatcaacgtattctatgaatggctatccgagatcgctatggatctcgatatatggagaaggacaagctaatcgctacacttgagaaaccatctaattggtcgactgagctacagacatggtacgaggagtccggtcgatatatctactcgacaagccgcaactccctcgtccggttccgggcataaacatctttgtacttgttccagatcctgccgtgaacacgctttatgagcctccaaggctatctcgagctcctattctcaatcgcttaccgcatgagttcgtcaatgtattgcttctgatacgcttgtaattcttcatttgtagggttttgattctgcttgacggtaatcgggcgtccgactatccaataaggactcgttggcgctgcaagtcagaggtccaaatagtagcgaggcctaactcaccgacagagacgatcggatgccggaagggctgcgacgatagtgggagaatgtcaatgtcaatctcgacacttgcagccgcaaagaatttgcgggctcaccatcagacccaggttgtctggatacattattagagaaggtatcatcaactttctggaaagtgtaccgtttagtcacgagcttcgacttacagttgaagaccctgtgttgagcatggattgcgacgagtcagcaaaaggttacgtggcagcgcacaggtccgactcgacttacccccgaccatgaaacaagggcaaagtgaacccaaacaccttctgaaactttttctgcagcttgtatacggtcgtcccccgattgttcgctctgtgtggtatggttatcagctccaattcatacagacattcatcaatttgatcgcgcacaattgttcgtagacctgaaaattggctcaaggcttggtgaggatttgactattcgggactggactgtcattgcgactcacgtcgttctctccgaacgaaaacactggcaccagtcccgctctatgcaaaaaatcggtcagcaccgacataccatcggcgtgtccttccgtcctctgcactcaaagctaccactcacccttccctaacagcaagcttgatgaatcccaagcgcttcttcagcgtgagatcgttcgtccctggatgagccgccaaactctctgcggcaccacccacgacgatggtgatgctattccccgggcctttccgcaagacgttggagcaggacttcttggataccgagcagacgcccaaggcgagcaggatgtcgcggtagagaggaatcttgaaattggaagctgttggtaaagcccagtcagctcagattggaaatatccatcgcagaggtaccgactcactgagagtaaggagatgaggcttgataccggggaaatatttggagaatcccgtagctgatcaaatgaaaggcaaggtcaacatcctggtcatggataccatcaatgcggagagatgatcgctcatctcaccttccgtggcaaagttgacaaacgcgccggttccgatgatacctgcgtccgaatgagacagctcagatctcttcgacacacacaacagcttgtcaaaccgtagatcttgaaccccgacttaccatgcgggtgatatccaaagacatatggcttgtcggcaggcaattcggcttcctagaaaacgacgaaatctcagctcgattcatctgcggcttgcgaggcgagcttcatccaggctcttaccttgatcatactgcatcgtgtgtgatcggtttagcagtcgacgtgattagcccttagacgctgatccagttgacgcagatcctgtcttgcctcacctgacggggtaataacctaacagacgccgcaatcaatgagaaatcagctatcatctctttcaccgcgattgtctacacttggtgaacttaccggcgaaatgtttgaaaaagatggagttcctgaatttaacgctcacccggcctccgtaagccggagcgttgtccatgtacatgaagatcaggtaaggaaagacaatcggccagaagagagggatcgagctgcgacaagacgagagcggctttgtgtcaatagatgaggtgtgcgggaaagcgcacagaaacggagcaggacaagggggtcagcaggtgattcgacatgcttaccataggaacagaaagacgaccacgctcaggaacaggagaaatgaccagaaggccaccactgccgtctgagtacggcgttgaagaggtatagataacggagcgaagctagtcgatttcggtcatgtcagtcttaatcttttgggtagccgacgcggactttaactcactggacgtcgacgtccatgttcaagtttggcgtaggcatcttgatctcgggcatctccatcctaggtagcttgctcatccgttccccaagcttgtcgagttgaagcccttcgaagacgttgcgtccgatagtagccccagctttcaaagtggactccatagatgattccctcttcaggccatccggacgccgaggttcgagcacggacgagcctggaatagagcccggcaaggagtccgggtcagatcgtcgaggtaggtcatcggaggagagattgaaacccgatctttgtctaatctgaggggaggagactgtggacgaggtggtagatgggaaagcggtcgtcggtgcggaattgagcaggtcagaggacatggcgacgttgatgcgactcggccgcgagtttccagcgggataggagtcgtttaagtggctcaaatctttcgatgatggatgctcgaagtattaagatgtcctgactatgataacaaagcctgatttgatcatgagcctatgatcctatgaggtaaccttgcggaatgtagcacattgaaataggtattctcatgaccataagcgagcgaagcaatcgtcatctttcatcctctaggggaatctcacgggactcaagggaatcatttatttccaccaacatctgtcacttacgtaaagataaagtaacgtcacacattccccttatttccaccttgaacacgtcgatcacaagtagcgtaccgacttcatggattgatcatgtcctgtgagcctgtagctcgtagagacatacttgcattcaattgccgattgttactagcacttggacaaagtacacgtagacgagatcctagcttctgtagtctctgagctttccatttgaccatgggtcaagccttcagtggcggctcaaaccctgctgtacgtacggcctgtctcgaacgcaaaccgaaatgataacaacgatctgaaacccatcaacctggtcatacaggatggccaagtcaatccgccaccaggatacgtgacgccagactttccgtcgttgtatcgacccgatatcattggatattttagcgggccgactgacgggtatttcttgtattacgccgaaggtgagtccaggtttagcaaatgagatctccgatcggctatactcagcttacatgattatcctgcgttaccgtgattctgcagacatctttcacttcacgctctactggcacattatctttcacgctgccatttttggcctcaccggagcttggttcaccttcgtcgccctactctcgcctacttcgagcgtgggggtccgttcgcctcccgatcgaagagccaagacggatttccggacaaacaccgaggtcgccgaggaaggcgctcttgatatggacagtaacaatcgactaggaatcagaggatatcggaagggttcagcgagtgacaacgaggcggcaaagagcggtatcagggagaggaccagaagggggtctagtagtcgggcgattcatgggcctagggggttgtcggatcctctctggtccagggaagacgagggagaggagaaggaagacaggtccaccgggagatcgaggcgagattctagtgctgacggactgaagatcatggactttgccgagaatcccgacgacattccgctgagaccgaccaagagcgggcgaagtggtccttcgcgctcttcatccagcacgtaccaccctaaacctcggcgacatgacgaacgtgtgagaaagacgtcggtattgtcctctcattcggagcagtccagcgacctcgagatgcatcctacggaagccttttctggcgcaaaagatcgacccgtgcgacgaccccctcgatctccctctccacccacaatggaaccgccttccccgggcgatcttgcgctcgacagacccatatcgcatacggacgttccgattccgaacttatctcaatattctctgcatcgggaggaagacctcagccgcgatgcctccatgtctgaacagcgccctcgggttcgggacgccgatgagaccgcacggctgtcgcacgatcgactcggaccgctcaaaaccttcttctcttcgtctcaccacgaggacctatcaggcatgtcccgaacccgctcgcacgccgaatcacagggagaatcactcaagacacgccaatggtcaagaaaagcgaagcatagccgtcgacccgccccggtctggttagcggctttacccttcccgttcttcgccgtatggggattagcgagcgcggtgatcatgtcgaccatcatcgggttcacactcagcgcggtctataatacggccgggtttgaaatgtcgacgtaagtctgatcggctactcctatcattcataccgagatattcgtcctgatacttcgaggctatattcagatgggttccgttcttatgggctgtcatagaagcagcgctggtcatcatctcgtgagtctcgtagacattcattctactgcgtacgcttgctgaggaccatactttgccactcaacaggtcttattcgaccttgacatcggtattgtaatacagttcgaggttcacggttgtagcattccatcacaaaagttgtattgcctcagagcaaccgctctgcttttcaagacacccccgtcaattctaagaattttgcgtacgcaggactgctggttgctacgcttggtcatccctctccgtcgttcgtcaacttcacacatgtggccaatcggcgcaaagggtcgcgtaacctaaagccacagacatacagtcgggtactgggggtaggcccagactggcctaagatacagacagcggaaaagacgtctccgacgaggtcttgttcaagatgattagaaaccgctgtactgagaaatcaagggaaacgagcccctaatcgagtttttcatctccgtgagggccagacacgttctgatgagcagctttattgccgctgacatcgctgactatggccagtctacaacggaggggcatctacgggctgcatcgccactctacctcactgactcttgagcttctcacgctcttgcttcttgagcgccctagtcctgatgtccttgtgaagtcctgacatccgacatccctcgtcagaatacgtttcgagaaaccagaatctgcgcaatgcactcactcaggttataccagacggtaatgttttcgggaatgtgggccacaatgtaatccatcaaagcgtggctccagaacggagtagactcgtaaaccctcgactgagctcctcggttcagtccgatagacctgagggtcgattgtacaaaggtttgcgcggtggggaccatcatggaaggcctcctaattttggacatcttcgagacctgtttggcgatcaagcaggaaaacacgtcagatcggatgaccgatctccttttcggattcacgactcacgacgaaaccgggcaagacgagcctgacaacgacaccgctggccttgacctcctctccgagagccttgttccatgtcgcaaggaatgccttggaggcagagtaggtggccaacagaggcgaaggaacagtacctccgaaagaaccaatgttaaggatcaaggacttgaccttgggtccaggcgcgctcttcttgataaggagatgaggaagcgtaagtcgggtcaagagaagcgtagcatggatgttctaaaggcgtgacaaaggctgatatcagcatctccagcttattgataccctcgttacagctttttcgcactcacgacctgcaagatgttatccatttcctccagcgaagtctcggcgaacgagactggcatagcatgggaaacacccgcattgttgacgaggatgccgacttgaacttcgggcgaggcgatccacttggagtatgcggagaagttttccagggtgggtttggagaggtcgatagggatgacggcggtctgcaccaagggcgatttggcggctacagtccgagaacgagtgagccaatgcagagcagaattgtcgatagcagagggcacgcttacagatttcttgctcaagcttgcgcaggctctcctcattccttccgataaggcagacattgaatccggcacgagcgagctgcttggcgaaagcttcgccgatcccagaggtacagccagtgactaccgcccaacggttctgtttggctccgaaagtcttgagctatcatgattgatgcgtaccaggatattgtcagtaggtaggcgagctcaagctaggccgctcgatgtgggcagtgcacgtacactctcccccctgaacaggaaggtttcggcaaggaaaaccaggatggataccaccaccctaccaagggcaaccgctccaatcaatgacaagatgactgcagatacaggcacatccatgactgctcgagttatattgcaattgtcagcaaaatttttgtacttcgcgatgccataccagcgtaccgacgggcttcccaaagatgtgaatgatgcgatgcgcgacggaatcggctgccgaggccgtgtgtgcagcgacgaaaggttcagctaccatggcgactgtgagtaagctcagagaagcgtctgaagtagtaggaatgctgcaaaagagccgtcccgatcgttagtaatcaatgatcgtgaatcctggagggttccattgattataatatcggacaatgtcttcgtcaaggagggtcgacgaggtggaccgggaacctgaaagaccccgatatatgtgccgtcatcgttaacgcaatcatcagatttgattccgcctccttgttccgggtgtcaaggttcctccatgccatgttcaacatgtatacatgatacatgcccataccttacctcgactcctactgggagtcccattgagacatagatttatagagacgtatcggatagaggcgattcgctattaatatgccaccgtttcgaaactttccactcgtatcggggatcaaggagaaggtcgaagcggtcctgcctataggtatgcttcgtcatagtgggagtcgctgcttagagacccgcatgttaaggttgaaatacggccacctacccagacgatcagatctatgtagctctcgcaggaggaatcatccagacttatcaagtggaagggttgcaggacggtgagctctcatgaacacaattaaatattgtaaatcataacctgacggagaggtcctctcatctgctagttggctcgagcttgcccaaagccaagctggtccgcacgagaaagggtgtcacacggaagcctattgatcagttggagtacctggaggatctagatgcactcgttgtactgagtggtaagagtctccgcgagcaggttctcagtcccaggtcagggtcaagctgatacgtctaccctcgattgcacagaccagactgtcactttgcttgatttgccaaacctgaagacgccgaccgcaatcacccaagcgaaatatgtacagtccatatgtacaaggaccatttgggtaccgcctaccaatctcaaacgaaattccaaggcacaagagccgtgcccggaggatcaacccatccgaatgtcgatcctcgtcatcggtgcgaggaaaaaggtccatatcttgacctacgtctcggggaaacctcataccgttcgagaggttacattacctcatactccgaggttgatgcttttcccggctggagccaaggcttgggcagttcacaagaaaggcattatacctgcccccacgatacatctccactacaacgctaatgattggggggtcttggaggtcgacctcttttcgagtgaaaaaggatccgcagccgggctgagattgtcggagcctccggccgctaccggcggaccctcgactgctacagggatggcgggttccacttcaaagttagccatgacagccaattcaggcccacaggataaggctgtcccatcgggaggtggattgggggtgggggcggcgttcggtggcctagggggatatgtcgggaaaggattccgtgctgtctccggagccagcaccgctgtcaactcgattgtcggtgtaggggtcgggagcgattactttgaagaggcggatccgaaagctgaggatggtcgctcgaaccatacgaacggagaagctcttgttataagagtagatcaaggcgtattttacgacggcatggggcgtctcacagaaactgcgcctattgatctttcgggagatcccccagacgacctagtgttttcagatccatatatcatctcggcaattccttcgacatcccagaatatgccgagtagggtcgaagtcaggctcaagcagactctcgccgtacagcaagacattgcgcttggcggaaatcccgtagacccggatacgcctgccgctgccaccaccggatcaggccacatcgacaacgccgcggttcgttgcttgtccgtctcgaccagaacaacgagcgacatcgcaacaagggagccagaccatggcccgctttcagtagtctgggtcgcggtgccacaggacaaattgcagttacataacgagggtagcgttctttggtgtctgcggggagagccttggaaagccattttagacgatacgttgaaggaagggcgttttgaggacgggcaaggcttattgaaagcgatccagggacgccaagtcaaggatgttgaaacagtaagcgggtataacaattgtcacatgcgtgtttaattgatccaaaccgcatcacacagtcaaattatggtccgcaatttcgcagactgaatgcgcttgcattgttttccaaagagaaatgggaaactgccatcgaagagtttatccagatggatattgcacctgccaaggttgtctcgctctatccttcagaaactgttagcggaccgttacacgtctcccaggaagactgggtacaagttttcggcgggcccgaaggcggcaaactaagtccggccgcgaagaatttggaagacggcaagcgtcgaacgggacaaagcacggttgatatgctcaaaggaatagctcatcttggaggcgggaagaaggacaccgctagcattcgaggaaaggacaacggcagtatcaaaggcaaagatatggaaacgaactcggtaatgggcgatgaagctaccactcacgaatcaagcaaggattcgatcgttgaatacgagagtacgtatgtccccaatactcctctagcacgagactgacaaggaagagcctctctgccatagtatatccccctgcggcgctggaatccttgattcactttctatccgatcgaagacaaaagctggttggggccatggcttccgtgccaggaggactaccagcgaccgatagtttgccaccattcaaggccttgccacgatctgaattacgaggctacccggacgtgcctttcaccgagctttcccccgagcaactcgtgcggacagcacagatcgtgtacacggcgctactcaaggtatatctggcaatcagacctgttctagttggtagcctgtgtaggattcagaattggtgtgaggtggaggaagtagaagagctccttcttgagaagcaggtaggtcttttggattgcttatgacagcgcatcgactgatgacaggcacacagaggtattcggatctcattgatctctaccagggcaaacggatgcacgagaaggctttgactctgctaagacagtacgagctactaagcttcgcttcaggttatagaaagacagcttattttgatgtgccctccagacttgcgcaggatgaggaggacaagctcgatcgattggacccaaccgtaaggtacttgcaaaagctcggctcagatcaccttgacttgatcttcagtgaatcggattggatcttcaaggaagatcccgcgtttggcttgcgtgtgagcttcataattcgagggagttcgccgactgtcagctcaccatttaacttccagatcttcactgctgatgaagccgaagtggaagcgctaccgaggtaccgagttttgaaatacctcgaagaaacagacgaagccagctgcagaggatatttggagcatatcacgggagaattgggagaagccggaccagacttccatgataagctggccgagctatatctcaagtcggcgcgacgtcaatacgacgatccggactgtaagctctgtccacagctttcattcaactggcatctcagatcagtctcatacagatggagaagcccggctgctgcaattcctcaggacttcagagcaatacagaccagaccgcttgctcggcaaaatgcaatcagaaggtgcgctcagtcgaaatccatttgccgctcgtgacgcctaagccaatcatccgcgcacagagctacctcgagtccgagcaatcttgctgggcaaactcggcaatcatgatgctgctttacaaatttacgtttaccgcttaagcagctttcctgaagcggaagagtgagaattacatctgaaatgctcgttcacccataataaattcgctcatgcattgtcccgcaggtattgtgcacgagtctatcaagagcacccggacccaaacggaattttcttgtccctcctccgcatctatctgcgacccagtggaactgctccgcctttgaccgaccaagcattagcccttataggaaatcacgggacgcaaatcgatgccacaaaaaccatcgatttgctgccgcccctggtctctatgcaagacgtccatcaattcttcgtcagaacgctgcgcaacagccactctaaatccagccaggccaagatcaccaaaggtcttctcacggcgcgtcgtgatcaggtcgatcggaatctcgcgctctgtcagcagaagagggtcaggatctccgacatgcgaatgtaagtggatgtgtcggttatcgaaagatcgagctcgctcaacgcgctcccctcccctccaacagatgtcctcaatgtcaaaagcgtattggacaatccgcaatcgctgttcatgcgccaaggtatgtcaggatggggtcccgctttagacgagggatgctgatgctttccgaccggttgatggctcgtgcagaggcgaagttacgcactacaactgtaaagacacatatagccgcactttggctatgcatcgagcataacgacattagcgaatatcactgtagccaatacccgcatgaagatatgtatcaagcgctacatgtgtacgtgagcgctgatcaggaccggtctatgctgtcatcggcaatcaagctggagtgatgccttgcaaggcactcccagccgccgactctatggacgacttcaaccgtttccgttcttccgtcctctcttgcgcggctttcttcctctgtgccgggtccgcctccgcttcaacaggcatgtcatctgctgcgctgcaaggtagcaatccagcaagttcagcttgatatgcagcaagcttcaagcttgtcacttacatgtcgagcatgaattcgcaaacggccttttccccaatctcggcctcagctctggttccccatttccattcgtagtgtatctcttgtccggcagtatggccaccagccacgccctgtatccgtgcctgtcatttccgaatcagattagtatgctggccggtttaagagagtcaccatcagcaacgtactttctgaaggtagttctgccgaactagcagagtcagatactcgctgaatttgattgttgggttcggcgagtctgcagcagcgaacggcaggatggtctccggtcgcagattgagccggtcatctagttccttcatgaatcgggctagaacgtttcgagtgttctgaggatctgtgccacccagtagtctagcgaaacgaaagcatagctgtgcttacagtccgatatcgtcctgtctctaaccaggatgatcgccagcaatgtgaacaagacccccttgagcgctacacctccgccaagtacgccgtcccctttgtcccaggctaagagcgccccgcaatctttccttcttggacgtcggttcccgtcctggggaagatcaatcgctatcggacgattcatctccctgataagctcgatagacagggtcgagcggaggatccacgctttggatccgggtgcagctacgagcgggtcgggaaagtcagcaaagtagaaccgaccaacctctagatgccgagaaatacctttcctctttgttgctggttccatagctccgctatcgtcgttggctcgcttcttaccctttgcttgtctttgggtttcgttctcgtccgcatttccctgcataagtaagacaggtcagtaaaaagcgtccacggccggccgacagggtcacttgtacataccgtcattggactaggttcggcgtttgctgcagaccggagctccaccagctccatcccgaatctttctctcaattcgatctgcgcgtcctcgaaaacagccggccaaattgcggtgtccttcgacagcactttgaggttcgatcgattgaaagtagttgaataagggaacgcttcaaggcgacgaccagcattcctatctcacccttcttgttgatgtcttccttcttgatcgcttgtctccgttgtgtggcatataacaccatcttaatcgtatcggtcactagtcttctatatgcctggaagatggccggggactcattagcttgtacgtctctttcacgaccatcaggagtgtgactgacggcagcgcccatttcactctttttcctcgctgcagccttgctctgatgactctctcctccacccagagtcgatgtctgtcccgcctgttgtgtcggtctgctgtggaactcggcatcgtctccgtcggcattaccagttccatcctcctcgtccgtttggtccctatcgtatacctcctgtcgagcccgtcgagctcctgttgtcgaagactcggcgtggtttgatcttcgagatgtataggtcatggtatttgatcgagtcatgattgtatcgaggtcaaggtcgaaggaccggctgacctcgcagatgttggcctgggagcttggaaatttggccttgatggtgctctatctatatctatgatctacaatatgttgaattgtggggtctcatgatctagctcttgacgttgtacggcagtgtagcattgggcatatcgccgtgccgaaccctcgtagatcacaccaaatatgataattgactttgatgaaccttcaagctcctcggcgaacgatagaccgacgcgtcgcgcggctgacgctaggtacttttccatccgggctcttccttctcttcagcactttttgaggcttcacttaaatcgggccggcctagttgagcgtatgaacctacatcaaggtagagcatgatgtctaagcttgatctggtctgaaaaccgtagctcagccgaaccacctaaactctagcaatacctcatcaacacatatcagagtttctctgaaatatgtccaacgcgcatcgaccgacgtaaggctaaaagatgcgggtaatcgtcgattggcagccgctgacattcaaccttgtacagatggacgcccgctatgggtaaggagaccaaagctggctcccgatcatatttccagcaagactattcggccaggaccaagctcaagtttcgtcaacctggacaaatctcccagaccgatgtggagaagcgggaccttcgcgcggaactcttgaaagcggaaagggaggcggtcgacaagaagcgcaaagctgcaggattggttcctctgcctccccctgcctctgacctgctgatcacagcgggagacgcatctcacgaagaagagcaggcgaacaagaggagaaagatcctggaagaagctgctcaactcgatgcagatgacgagagcgacgctgaggatgcggatcaatcggagaagaaaaagggcaagcagagggctgtcgacgggcacgacgatatcgaggctggtggtgctactgcggctggggatgatgatgacgacgaagatgacgatgaggacaggtaagccaaattcactgggtttgccgatgccgttcagagctaaccctgtatttacatttatgcagtgacgatgactctgatgacgacgaggacgagactgcagctctgatggccgagctgaacaagatcaaacaggaacgagcagaggaaaaggcacgacaagtgagttcttgaggtgtaccgacaccgctgctggataattaactaattcgacatctcgttcatcttatcaccgcctcccaggagcaagagtcctcagaagctaaccgtatagacagggagacagagattgctaccggaaaccctctcctcaacctgcaagctgccctgggtcagatgccttccacgcctcgatccgatgcagggacctcgacgaccggaagctttgccgtgaagcgacgatgggatgatgatctaatcttcaagaaccaggcagctggtgtggatgacaagccaaagaaggagtttgtcaacgatatcctacgaagcgagttccaccgtgagtgaaacgagattcagacagatatatgttccccgaggctgattggtctcatgtttctggttaccaggcaaattcatgtccaagtttgtcaagtaaacgggtgcctgtctctgcatttcttcccggccttgcttgtcactttcatcatacgtgtctgtatgtctgccgttccttgtacaaacaaccgatcgcaaccaaccgaaggttcatgtcctaccaccgaaggtccttgttgcatccggatggatttatacccgatgccgtaatcgatgtggaggtcggggtgattcaacctcgtatagagggatcgtgatcgacttgcgcgacttgttagcttgttatggatttggatgctcgggtcattccctgcatgcgtactcgttgtccgataacagctgatgcaagatttcacctcctagtcaatctttagatctctagcttgataggagcgagtgcgccataggtttcacccgctttagagaccgtcagtattcgcgatacaccggtgatcgataaagccaactatgtcagttttgagcttgaaagcattcgttcgcacttgcccgcttaatcatgcgcatgtcatgtccacagggcgtctctggataaactcgccatccgagggatcagagcgttcgatgacaagcatacaaatgtgatccagtttcagagtccggtaactgtgatcgtcgggaccaacggaacggggaaaacggtccgtgctagacctatacacggtggccttcccgtttttctcataggatactggttgtccctggcagaccatcatcgagtgtttgaagtatgctacaacaggggaacttcctcctaatacgaagggaggtgcattcgtacacgatccaaaaatggcgggagaaaaggaggtcaaggcccaagtccgcctgaggttctggaatgtcaaacgggagaagatggtcgtcaacaggaacctgcaagtgacggtcaagaaaggcggcgggatgacgatgaagactctagaaggaatgttatcaaaagtcgatccagcggatggtggcgagagggtgagtcggacattgcggtttctcgggatggtatacctgattcgtcattgcctcgatagagaaacgcgatctcaaccaaatgtgccgagatggattccgaagtccctcgacttatgggtgtttcaaaggcgatcctggagaatgttatcttctgccatcaggaggagtcgaattggccgctcgcggaaggatctgctttgaagaaaaagttcgacgacatcttcgaagcaagcaagtcagtaacgatccagcgtctatcgataggaaggcatatgatgtgctgacatcaccctggctggtgctggtgtacgaagattcaccaaagcattggaccatatcaagtcgatcaggaaggagcagaattcgaatctcaaggttgatcaggaaaggctcacccatcttaaggtggatcgtgataagtctggaaaagtaagatcgccctgaactacagtttgttacatcaggctgagcatatctacggactcagctccgagagcaaattgcggcagaccgtaccaagctttcccagaaagaagcggaagccgaaaagctgcaggaagaagtcaaggagttgacccggaccaatcaacagttctacgagaaggccaccaccttcacggccatcttcgagaaggctcagagtttaacgaatcaaaagcaaatgtatgaaggcaaccagcagagtcttaagcggacgatcaagctgctgaagggtgagaggggttcaaagatcgcttcacccggcacaatgaagctgatctcctctcgatcacagattctgacgaggttctcgaagagcagctccgaaactttgagcgagacacgtcggatcttcaggaaaagcagaaatcgaaacaacgttcaaaggagcagcgaaatcagaaattgcaaggacttcgagctagacaacggtcagagaccagcatgttgggatcccgaagagctaacagaaaggtgagctttaagaaggcgcttgctatatagtagaattgatcaaagtccccccactagacatatgacgacaatgccaaagcccgacaggaattggtgcgccggcagtgtcaggagctgggcatcgagggttttgctggggacctgggtcgggacgaaattcggacctatatcgatcagatcaaagaagtgatgacccacttgactacacaagcggagcgggtaaaggtaattcatccttcagcttatccgttttgatttgtagaacccgtttgacactctgcttccccaggccgatggaagaagaaccgaaaatgcgctcaatgacgagctcaacaacctccgggccaaaaagtcaacttgtgtccagatcatccgagacaggaccggccagctcgtgagtattggttgagcaaagacgaaactccacccgcttgctcacatgttccttctcagaacaacttgcaaaagagttctcgtgaccttgaagcggacatggagtctatcagcaccatcgaaattgaggtcaaaagcatcgaccgagagatatctggcctccagcagatgattgccaatatccgggaggagttcgcgcaagctggatacgacgagaaacttcgcgaacttgctttgcagttacgacaccttgagaccgaaaaggaagcgctcaaccaggagtatagccaattgatgagacagggcgagagcaggctcaaactggatctcgcgagagagaaggtgcaagatttagccaagcaagtggcccatcagtgagtttgcaagcgatgtgatctccagcagaaatatcaatgagccatatctcgtagtgtcgaaactcacggtgcaaagttccgcgatatcgctggagaggatctccttccgcctcaaatgaaggagaaagtcgatgctgcgaagcggtaaggccgatcgctgtggttgttctgcgtatgcgagcttatcgcggcccagcgtcttacaggatcaacgagggtactttgacgtcaacagaccagacaaggcagtcccataggaatgagcaagtgcggctggaaaccgaaacgcaatctcttcaggacagcatcactaccatggagcaagagtgcatcggtcagtacagcaatgaccgattgaaaaacgagtattgacgggaactcaaacatagctgtggaacgggagatcaagactactctcgacgaagcccactacagttcactagaagaggccgtcaaggatgcgaagagcgagattgaaatccgtgagaagtgagtgcagtatgcttcggtttgttcagccaaagtcgatctcactaaatggatggatggaatcgaaacagcttcctgaggactgctgagcatcaagaggacttctaccagtccctcctggtacatcaagagaaaaaacagacgtgtcgcggctgcaaccgaggtttcgaagccgatgaggttccagcattccagaaatacgtacgtcttggtcaaccagatactccggacatacaggctgacatcgtttgtcaaagatcgagcggcaaatatcgaagatccgcagcgggagtcagaagcaagtgcaagaaatgactgtcgagcttaagagctggcaacaacaggaatcgacataccaaaggttgatacacgaacacaccgatatgagcaagaaagctagcgagtctattccggaggcggaggacaagatcaagaggctgcaaataaaaatcgaggatatcacgaagaacatcaacgaggttaatcatataccttctcctgacatttctatcatttatatgctgatcaattccatacacagtgcgaccaaaagaaggcgaaatataggcaacgggcaaaagatctagaagccttagagagggcagcgatcgatgtgctccgttgtctggcagaatctgaaaaggctgagagcgaggtagacagcctgcaaagggcactcagcaatacaggctcgacgaagaccccgaatgatgtacaaagtcaaatgcaggatctcgacaagcagatgtaagccctctcgagctgcataaaaatgttaactcaagctgattagcaatcgatacagcaaatccaagcgagaggacgaggcccgaattaaatccgatcgcgaccaaacgaatgagcggctgagacaacgggagtctgaactggaacgtcggcgtgtgcagttggccgaggctaaggtgaaacaggctcgtcgacaggaattggagagaaaggtctccgatctcaatgaggcgatagaaagatgcacgaccgatatcaaggtatgctactgtccctatcgtgaccctcgtccaaggtatcgtacattcttgatcacttgtcccgtcatagtccagcgagaaggagtctgcagagctggacgggccgaccaaggttgcagccgagaaagtccaatcacacgtcgccaaatttagtcaggagcatcaagagttgtctcaaaaatacgaaatctacaagagcgcgaagatggaagttgactctatcactcgcgcaatcaagaagtaaggtttcatagctgtaatgcgagacagatcatttacatttctatctaattagatatgacgacgaggatggtgatcgcaagctcgatgaagcagaagagtcggtcaaggagatcgagcgagagatcgtccgcgctgaggaagatctggaaactttgcaagaggagattgctgcactggcgcagcaaatctcagaaagtgacaaccgtcgttccaccatcaattcgaatatacgataccgggaagcggagagaaagattacagagctggaaaaggaaatcgatggtatcgatgtggaaggagcttcgaaagccaaaagagacttcgaaacaaagtatgggcaggtggaccgagagaggacagccaagcacggcaaggtcagtctcatcagtcgtgtgtcctgctgccgagttggtcgctaaacatagtgcaatagcatcaacaactcgttggtgagatttctcaaatgagagagaatctgtcccgcatccagaagcagctagcgacagaatataagggtatacatgacgactataccgaatgcttggtcaaattcaaggtatgctgatcgcgcagtcaccacggaaaatattgtctcatgattgccctatcagactggacaaatggccaacgcggatctagaaaagtacgggaaggcactggacaagtgagtatctacgctctgtatcgattcactgtcgtccatactaacgaaagatccgtaacagcgcaatcatgcagtacgcagccgccaacgtcttccatcgttgcactttactaagtatgttttttggcaggtaccatgctttgaagatgcaagaggtcaatgacactttgcaatcactctggcacgatgtctacaccggcacaggtgattgaggagtgaacatttagatctacgaggttgccgctgacgagccgaatccggcccaatctagacatcgatttcatcgctatcagagccgaggccggaacggagacggctgtcagaagaacatacaattatcgagttggtaagtcgtgcagagtagcggagctttctctctctctctcgcactcaggaactgcttacttactgcgtatcattcgacgggcagtcatggtgaaaagttagtccatgcggtcgtgatgttgcgtctcctgactgaccgaaacatctcttcccagaccaaaccgagctcgacatgcgaggcaggtgtagtgccggtcaaaaggttctcgctagcatccttattcggatcgccctggcagaaagtctgtcactgaattgtggggtcctggccttggatgaacctacgaccaacttggatgtcgaccacatcgagagtctcgccaaaagtctggccaagtaagagcgtcaagctggctccttcagagtctctaagtctggtgcactgatccttcttacaacccctcgccacagtctcatcaacctaaggagggacaatgcttcggcccaattgatcattatcacgcacgacgagaactttttgcgtcaattggctgccaatgacgcttgcgactttttctggtcagtcaacgcggtcttcagacgtctgtgcacgaagtttctgagatcccccgctatgaactctatataggagggtctctcgagactcgaacatgaacagtgttgtggagcgacagagaatcagcctggtctagtcaatttagaatgcattgctagcgcgacgagcgatatattaccccgctggctgctgtcaagttgcgaaacccgaagcgccggacacgatctgacgccctggattcgatcgttatttacgaaaaggccgcaaagcgatattctcgtgtcatcatcaacacgtgtcataaatgcacaattacaatagatcgtgaagtcgtgtgccgctgctctgtgaatctgcatctacaaagcgaggtagtctcggacctcggcctcgctgagttttcggaaagtagcgggcagtctttctccactcttggtctccatctgctcggccgtcggtacgctgacgatcccgatctcgatcgtcctttcagtcatctctccctcgaatccttccttgagggtcaacagggcggtgtgaatagcatcctcgagcgaaatgtcatcgctgtacctgttagtcgaatcgaggcgaatggaattgcataagtagacagccagcaaggttgagagtatcaccaaacagcaagcttacctcttctccaagaaggtctttgcattgctcatgtttttaccgatcgcgctggccttccaagcccagaaacttcccgaaggatcgatctggtacagagactgtccacggtggttgtcccatccacagacaagcagcgagataccgtagggtcgaacacctctgcaaacgaaaagtatcgggggtcaataacaggacgcgattcctcctagatatctctgggctacgtacccgctctgagtagccttctgcatgacagcagcaacgtccgcaaccaagacctttacgggagggtactccccgtagaccttccagtaactttgagcaatcttcctcgccttggcgacaaggacacggtaatcgggacccattccggcgtagacgaatccgatattggggcagatcatggccaccttttcgagtgacgaatcgtcgaccaagggagagggggtctttttctcagtagcgaggactacgccattcttggctgtaaaacggcatgatagtaggaatgaggaggtccagtcaggttgactcctactactcatctgtaaatgcctttgtcaccgacctttgatccccaagctagtctgacccccagaaacagccgccaaagcatgttcgatctgaacgagctttcctgatggcgagaaagtggtaagggagaaactaaggaacgcaaagagacagggccataacggtttagacggcgatcgtgtgtgttgtccagttgatcagctaaatactgacgagtaagcgccgccgccgcctggtgcagacatcgttgatatttcgctgtaggtagtggtcgaatggggaaggctactagtctaaggagaggatctctatcgtaagcaaggtcgaagcaatccgagcaagttggaaccatcttcatggatatggatatcgacgctgatgagtcgcggccaagtccttggtcgctcgcgtcatcacctcatttgcggacagctagaagcgcgtcgacgttggaacaccccaaatggcaccatcttaatcaaccgtatttatagcttgtcagagccggtgtggtcatatggtacaagcacgaggctgacagagcaacgctctcagtgtctgtaagactacggcaggcggccacgacctagaacatagcgcaatcggcgtgcgagggggcaggaataccgacatgctgatttcgttaggactagcagattcactgcttcggggtcagccctcggagcgtaatgtcgtacacgacgtcttcacaccgcttgacatcatatttgaggctgtcaaaccttcgcctcaaggtatcgtttcgcaagttgagctatatttttttgggtcgccgagcacgatcagcgaggccagctagcgatgagcctgagcgtcttgcaaacacttacgagggagaagccggcgaagagatccttctcgaacgatgctatccgcagaggcaaagcgaaattctgcagagtgaccgagttcatagccagtcgtgcctgttcatcataacgcattgtcgggaaggcattagtatgacatcgccaagttgagaacaggtttaatggactcgccaattcgttagacgctccgatgaccccctgaaggtagtcgtccggagagagctgaagcctatcgttccactccggcttgactatggaacattgatctgctcagcctcgactctacgagagctttgccgaatcatgagactcactgccgatagtggacgtgaccgtctcaatcggcacaagatcgtcatgcaaaaggaaatggcaaagagtgatggaagtggtgaaagatttgaggatgaacgacggctggtactggtatctgacaagtcgcaaatatctcggttagacgatgcctaaagcaaaaccgaccatgggagactagctcacttgtgatattctccagcgggtatccgctctgctacgacctgccaattggaagccgaagccttgatctgctcgagggcttctcgagccagagtctcgacttgtataccacggccagtagatttagtacgcggttgttacacctgagtacacgactggactcacgctgatctccgggagtcgaatggctgcgattcagcaatgccgtgacgttcctggacacggtatcaagaggttgcaagctttctttgatgctctgtatagtgcagcggtattttccagcttcaatcaaagggtccgatacatctgcctcgacccgacgtacctctttcagggtcgattcttgctcgaggtcggtgctgatcttttgcaggatcgcactcaaagaagatgccgttccgctcgtttctgccattgtgtccgtttagtactagtcgaatcgatttatccggagaattgagattggacgccggctcggaaagttctaagttccccctatagatagtgaatggtacacctccaagccagtcggaaagtcgagatcgaccagatccaacatgatgtctagtcgctagtcgatcgtctgggtcggggtcggcgatgacggcatgtgatgacgaaagtacatggacgatcaatatatgacaatgtccgcttcccgattcacttcgccgaagggattcccaatgcttacggtcacagcgttctcgttctcttttccatttccggttccgccaatcttccagaactttgcagggagtttcttgtccgagccttcctgaacttggtcgggggtttatggtccaagacgggatagtccgagacagacttgtactttgagaagttcccttgggggcccaagacgaactcagtcgcctgacaagcacagagtcgttcatgcatgaattagggaggctacaatggttgatatgacgcatctacagatcgagattccactgggttgttgactatgcattcctgtcggctgctttccctccaagaagatgacccaccccttcgtacgctgcaatcatcatcccgcaagccggagcgaccttggcggtcctaggcacaacgccggcgaataatgccttccatccttccgtcttgacgatgtgcgtcaacaagggcatcgtactagcaggatgcgccagagctgcgggtgagcaagttttggaaggcgtgaagacctgtcgtctggtcttcaacacgtcaaaaggggaagtcaccagggaggccgcggttccggacaaggctcccgagatgaaggtcatggtgattccaggctgaatgatctgggattcggtaaagtaccgcttgagcgattcgaagcctgcccagtagaggcctgatcgaaaaaagttgtggacctcatcagacccctggaatagtgttattggaaccgagagacttgcctgagaaggggacgtcccgccacagggtgggtcctagacctctccagagagctcgggttccctgctccttgaccatgatcgtgatactagagaacgtcgaagcgtagctaggggccgcttgtccagctataccatatgacaacagacgtcagtcgaatggcacgcacagcttgatcgaccgacactcacgcgcaggaagagcctgtaatcgggtcctgaacagctcgatcggactgatcacagtggcgctgatggttctggccatgcttccagccaagaacggtacgggagagaggtaggcctgcttttgagctgttgtcgtggtcgcgttgggttgaccagcggagtgatccgaaaggttgagcgtcgtatgctgcggggtgatgacgacagccggagtggtcttcaaggtcgtcgtggtcgtggtcgagccgggtatccgtccgttcatagcagcgagaaggtattcgtagccgagcatatagatgctcgcgctggggatggacatgaccagacccgtaccgactcccttccatagacctcgccaaccggctggttctgccatgatcgcccggacctcgttgaaaaatccgccctctgcactcgttccaacgagcttgcggctgagctcttttgcgccttctcgagcctgttccccgagcgcagcgatgcccttgccaccaaccagtggcgagcgtcggatccgctcagcttcctcttgagtgacgatctctccccagatacctgcccatttggacggatgtagacatccttccggtgcaggtgggaccagtgtcgctcctgatgcttgtatcatccctgcttggattcctggacgacctatcgttgccgagaatgatggcataaaagagggtcgtgctgatgaagaagggatggtggctccgaggcaagtggcgtttgccgtattcagaggagccgaggatgtgggcacaatccgctgtctaagtgaattcggccccgggccggcttgggcagatccatcccctgtgggcaagacggccgtttggcagcacatggactctgctagggaaggtgtggcgttgggcatgatcgtctgacttggccgtaccgtctgcatccgggtcttcagcacgtcaaagggagtcactgcgaggaagataacggatcatcagctctcgaggtatgtcttcgagttcagcggtcgtaactcactcaacaagctcgtcgagacggctccagtgacgctggcaatcgctttggcacccaagggaccgaccagagcatcgttgtccaacgccgagtcgggaaattgtgcctcgatgaactcctcatctgaaggctcgtattgccagtcgatccggcgatgttcgtttggcgcagtcgatgtcgaagtagaggcggtcatatttgtcatgagcgatcgcgagcgggtcgccggcgatctgatgggtcagaagatgcctgtggttgtcagaatgtctgagataattgttgcagatttatgttgatttccttcgagcgattgaacggtctatctggcctgcctattatggcctgaagttagacaaggtctatcgacgatcgctaagaagttcgtcgatccctccaactgaattatctcgggacggcagctagacgggacgcaatcggggctttcgggggcgaaatcttgattacgtaaacattcatcccgcgtcattcggtcggcatcaatcatagagtttgggggtgaccgtacatcacgatcatcatcagatccggcagatccgcaatccgctccttatcgtgttggacagcaacggtagctgcagcgaatgataatgccagccagcaatcgatagcctcaatctgctgccgtgatggaatgcgttcgattaatccgatcgcgcgttcgttcgatgatatatcgatacggctcaggtggttggcattttggtccgcgtgattattatgctacagttcttgatcaaggatataccgagtccagcccggcccgagatctagacttttccagccgcacctcccagaacgctctcgcagcactgccagagctgtttcatgttgtctcgacaactctcctccatctccttgtccgtcaaccccgtccgggatgccgagtcgacacaccgagtgtagttctcgatctgcattccgcaggtagtcttcaaggatgacaggtttgggatgctataatgataatgatcacgtaaatgtgatttagtctgcgactttctggaatggaaatcctgtttcgcagggtgctcacgtttcgttggcacactgcgtcaccgcttgagattgggttttacaaatgtctgcccaatttccgtcctggttcttgatgacacactgcgttcagtcgtagatatgtaagtccactgcaaggtatgtatacgatagcgaaccccatgactgacgtcttggtatgcttgcatctgctgagcgcattctgaaagatgcgggacggccttgtcaggataatgcctgagaacgtgacacctgtactcacttgacgcgactaggttgtatgcgatatccatacttcaagacggacaggctatggacgtggatggaacaaagatgatggaaacgcagtgagcctcgaaccaagtcggcgaaactcgatgtagagctcgacgtccatccatgttgcaaaaggcccgggcaccttactgcggccgactttttgggagcttttgctcccgtcatgtacgtaaagtgacgcaagcaagtccctccggctcagcatttgagcatgatcatggttgtggactctgagccagctggtcagggatacgaggttgatgttgaccgaacaagcagcaagaagtgcatatcccaatccggctgaggttcaatcaggaggaggaggcaccccgccatgtctcatggtaacctctttatttccagcacgggtaacgccagactttcctgccaaatcacgtcgatcggtcgcaattatggacttttatcggaccgaagatcgcgcgttcgacttgacgcttgctttcggctcggtgccgtccgaatatctgcaccttgaacctcgttcgatgttgcctgcctgtactttcgaaagagatggtcgaatttctccaaaaattacactgctcgagctatcgtttcgaagtgcgaactagcctgacgtattgcagagctattagagctgttagctaaaacggagaaagcacaataccggccatagtatggacatcggcctacggatctgaccccgagtttcgccgatcaattctcggtgcccctggattcgaggtacgaaggacgaggttgttaaaggagggagtgaaactcgcatattcatcgcaggattcttgaccccttgtcggtctggacaaaggcgaaattagggacccggtatatagataccctgtcttgaggactaccgagaactaggggtttccgcaaagccgtccctctcgacgagagtcataggttggatagctagacatattccaaggatgtcaacgagcaaagatcggccggcgcaggccagaaatcgtcatgatcagccagtcaagctggaccaattcgagcgaggcgtggaatcgaggaagatcttgctggcgatcctcattccttgcagcctcgccatccggatcctgttgctcactctgcaccaggactggaagggatggccgagccgcggagccatggatagtatggtgtggggttgggtcaatcttggcttgattgtaagtcgttgtcgtccgggtcatctgttgtacagaaagttctgacctggaccctccgttctcagtcggctgcggccgcaatccacgtactatacctctgtccgtggtcttacgaccatcctagatatcaaagacattccaatgtcaccgccgcactgttctatttcatcacattctccgccatcacctacttgatgcctggcttgctcttcatcctcaaatatcgtcgaagactgccagctcgtccggtaacttgggattcggaccccatctcctacggactcgggctggccgaactggcggctattttgctatcgttcatggtcattgggacgatgagaagggggcctgaactgtactacgacgcacacaagcttaccatcggctatggatgggcgatggaagccaagaatgcggaagatgagcccgcacggaaacctggccggttttctaagttgatggcggccaggaccaggcgcggacggataggtacctctaccccaaatgattccagccgagatgttaccgaagcagaggatcaggaggacgccctcttgctcggatcttctgctacctcgccgaccgccttttcgccctcatccccccgatcggttgatgaaaccgaagctctggccgaggcatctcctaacgtcctggactactatcaatgcagcatctttggactactcttgattcagtacatttggcccatcgctgctttagcggccaagcgacctgaattgcgccccgaagacctgccccatatgcccgagttgctacgatcggagaacaccatcctgccacgcttgaacgagcgtttcgtgttgactccagaggagctcgaagagaaggagtggaacgacaagcagggaatcagccaggctgccacgggacagactcaaaagccatggacgccatggactctgctgagggaagtctgccgagggcaaggatggctgattctgagctgtgagtggcttctcgagactgaccccgcgaatttcacgtattctgaaacggtgccgaaactgcctgttccttccagccgtttggttcgagtggatctacaatgcctcgaccttcctacctcgttactgcatgcacgagatcatccagacattcgaggatacagatcgacgatcagacataacgtatgcctatcttatggcgttcggactattctttggaagcttcgtcgggagtgagtcgaacatgcaatcttgcgaggaaacgtggagagactaacgcggtctcctctcgatagatttgctaagtagtttctcgcggtgagctttgatcgaccatcataaccgttggtgacccatgctgatagacctcgcgctctcagcattcgagagaacattgtcaaccacaaggcgattcgagtgaacttgagaaccatggtaagcatactcctgcatgacatcaatcgggatttgcttgaacggcttgccttctagttgtttcacaagatcctcttgattacggacgaccagtctcccgacgcgacaggaacgggaagagcccaggtaggcttaaacaggaacagattttacgtcgttgcgattctaataagatcccctgcgcaattcagatcttgaacttgatgaacgttgatgtcggggtgattgcatctctagcaacgcggatcctcggactcagtaacgccgtattgatgcgtaagtttatctgtctggcgtacgacaactctttgtgcagctgctcataaggtatcgagtagtcggtctctctggaggcttcctctattccatgttcagctggtctgcattggtcgcaataggaacagtgcctttgatggctcccttcagcgcatacgttgcaaaactcacatacagtaagctgtctccgcggcccaagcattgattcctatgaaagggtcgaatcgctaatctgagcgttacaggatgtgatttggcgttagcaaaggctagagatgctcggatcggtgccatgcgggaaatgcttatcagtgtcaaagtcatcaaagtgagtcgcgcttagtgctgctaaaatatagcccctgacgagcgatttcactcatcagctcaacgcctgggaaggtgagcgaactgagaccgacctaatacgagacataagctaatcagtttgctgtttcagaccatcatctccgccgcatctccgaattcagggcaaaagaggtccgcctccaaaggtggcgatatacgatcggctccagctttaatatcttggcgctgcttgccccgctagttggcttgtaaggcatcgtcgatccgattccaagagagtagctgaagagaactcttgccctcaggttcgccatgtttgtctcgtatacaaagcttcaaggccgggttttgacacccgccgcagctttcgtcgcgactaccgttttcacgtcggttcaaggtaacatccattgttacatgcttgactaaggacgcagctgatcttcggaaatcgccagaggctctgagtcagataccagaggttatacagaagctgctcatgtcgttggtttcgctccgtcgactttgcaaattcctcaacgctgatgtcgtcgagaacacgaatctacaagctggatctcgcatctctctaaacgatgcaaccgtgacatggccttcgcgggagctggagcaaggagtaactccgatccgggagccttttaaattgtctggaatgaccttgcacatcccggatgaagccaaatttgtgcttgtctgtggcgcgaccggttccggaaaggtaagtatcgtctcactgtatccatggctcgacgctgattcgtaccttgatagacgttgttcctacttagtctattaggtgaagccaaattgctcggaggatccataactgcaccgaaatcgagatacgggtccatcccgttgtccgacgagatacgggattactctgacgatcaaagcgaatggattgatgacgatgtcgtagcttacgcaggtaggtcgtctgtacatgaaagcacggatctgaaagagcgtttccgcttacaagataacgtcaaccctttgcttagcacaaatcccatatgtcactcatgggactttgcgagagatgatcttgttcggattaccttactcgcagtcgcgatatgaatctgtcgttcatcagtgcggtttgatcgctgatttccaaacgtttctcaatggggatcaagaggaaattggagcttccggagtcacgctcagcgggggtcagcgtgcgcgactcagtttagcagtgagtattgtggttctgcaaccgctgggactccgctgaagccgattggctttttcctgcacttagcgtgctgtttacagccgtgctggcacactgttgatcgacgatatgctgtcggcgctggacgcaactacctctcaatatgtctatgcccactgcttgcgaggaaaactactgcgcaaccgtcgcgtcattatggtatcacacaacatcagcctacttcttcccgcaacagacctagccattcaacttaaggatggttgcatcgcgagatctggaactcctaaagaattgcgtgaagtcttgttgcaagaagaggaccacacagtcactgaggagttcaacgcgctgttgcccccagatggggacaagcccaagtctctcataacctccgcatcgtctaggcggatctacgaagaagaacatcaggagaaaggcagcgtgcaactttccaactatggcttcgtctttaggaatgtcgggggcaaagggtattggctcgggttgctcttgttgattgccgtgccagaggttttccgcatttctatgcggttcgttgtcagacgttggaccgcagaaccttcgagaaacgactattggattcgaacctgggcgagcgtagcagcacttcgtgtctttgccaattcggccatgtggttttggctgtacggcaacaacagcggaggattcacgcaacgaggtgccgccaagatgcacaatgcgatggtggacggtattttaaaagcgcctctgcgatatttcgaccgaacgccggaaggtgagccatcgctccttaataatgtgccatgatcattgatgtcttagatctttttccgggacaggtcgtatcctgaaccgctttagtaacgatatccaaaaggtcgatggctatcttcccgattctgtaggcaggaccatcatggaaagtcttactgttgtcgtaaataccgttatcctagggatcagtttgcccgtaagtccgggaaatttcctgacctgtcaagttttcgaacctaacctttgcgttcagcctgtcgctgttgcctgtgcactattcgcataccccttcaatgcgttgagaaaattgttggttgacgtgaaagtctcgttccttatgcagaaactgacgaattttgcctagctttggccgtatgcgagcgagcctggctcgactagacgctgttctagctagccctatcagcggtctgacatacgagaccataggtagctcgacccattacccagggctcctagtcagtcggctgacatacttgcggacacaggttcaatcgtgaccattcgggcctttggttcttcacgtttcctttgccaactgttcgccacttttgaagatgtcagcaaccggatgtctatggcctcctgggccgtacgtcgaatgcggtgtcaatctccatgacgcatgccaggctaaaatagctcaatttgcagatctggatagccttctcgagcgccatgttgacccttacctctttggttttgggagcctctggtttcttcttactcggatcgaacctggatgcgccgatggcgggttttatcttgacctttgccttggatttgtcgtctcagatgttctggttactagaccgggtagtcaaccttgaagagcacatggttgccgtggaaagaatcgcagaaggcaagtcgcgcacgtctcgtttcggcgaatcatctctcttacctcgatcgtcctttagtcacaaagatacaacctgaagctgagggtgaagacgatttctctgtgccggaggactggcccagggccggcgaaatcgtgtgcgagcagctagcggtgcggtatgccagcgacctgccgctggtcttgcaaggtgtctcgttcaccgccaaagtgagccattcgcggattgggagttcgagtgcgtctatgctgagatcttccgagtgcagcctggggaacgggtctgcatcgttggcaggtctggtggaggaaaatcgacgacagcattatgtctcctgcgcgatctgaatccatcttcaggaagcatcaagatagatggcatcggtaagtctgaacgtgcgtttccatttacgattatgctcatggcaagccgtatccagacatcgcgcatgtgcctcttcacgttttgcggtcaaagctatcgtacatcccccaggaaagtcttttgacttcaggaactcttcgcgacgcgctcgacattaccggcgagaaggatgatcatgagctttacgctgcgatgcaacgtgtacaccttgatattggaaagggatcgcctttctccgatcttgatacactggtgtctgcaggttagtcacggctagaccgatgctgcttgaagagcgacgtgctgattattgtcttgtttgtgatcgcagggtgtgttcgctttggctgagcgacccactttggtgtgctcactcgtttatttcgtcttgtagaggtttgaatttcagcttgggcgagcgacaactcctggtactcgcacgcgcgctcttaaaatccgccaaggtgatcattatggacgaagcgacgtcttcagtcgactacgagtgagtttcgtgcgaatgcgaggcaaacggtgagaagatgtgactaactcgcattgacaacgcatgcaggacggatgcgaaggtcacgactgccatacaagagatgaagggtgtcaccgttgttactatagcgcatcggtcagtggggaccgtatgttattcatgctcaatactttgcactgacccgatcttcaacacgggcgcggctgcagcttgagaacaagtgggtcacccagctcacaaaggccaggcaggacagggtattgatctgattttgctctacagtcattgattacgacagggtgctcgtcttgaaagatggcacggtcgtggagaatgactcgccggccgctctcattacgaacgacaagtccgaattcaagaaactctgcatggcagacggacctatcgaataccagcaattactggccatggcgagatccaccaaaaacaacaaggcttgatacggatctggtccggaaagacctggttgttcgcgttaggaggatatctgtatagatcttgcatgttgtgtttatttccatcgagattgcttctatgcccaaatttcctcaggaccatgcacaagaagatgcaaaacaggcaagatgcggcggagggtgacgtgacacaaaatgcgttccaatcttgacgtgttcgatcgggcctcgacgaacccggagttgctttccactttcggtcctgtagggtgtctacgcgctactcagattgcttcgggccgatccggacgaccagtctgacgacaggagcggcgaattctcatggtatatgttgtaactatcgtacagagtcgcccaatgcacacgatacggtctgagaatcttgcttcctatgcccgaataatgaccctttacaaaaatcccctatatgctggtcctcttctcaggtggcccaaattcgttctaccaacccgtcctatgagaccgtctgaattcatcgtccatcactttctctcacatcccctccatgccttgcatcccatcagcgaagaaggcgttgggatccaacatggaatagtcaaacgtgtctgcgtcaaagacctcgatcccgcctgcgccgtcgccgccatgaagaccgaggccgaggctatcgttaccgccgtcgacgccatcgacattgttgttattggtatcgttgttattgttaccgatgtcattaccagaccctgtatactcctgagcaccgcgaaagttgaacaagtccgggtactggctgaacaggtcgaggtggtccatgttgccgttcccgttcggatccatcgaggtatccgccgcaggctgcaccgaagcgggatcgagcacgatcgagtttgggtcgagattcagagcgggattgttatcgaccttgttatcgaccggtcccttttgcgtcgggacgccgctcgggtcgagggtgacgttgacaggcttgtcatccgccctcatatcgacctctgttgagatcgccgtcgtcatcccctgcccctgcccctgcccttgcccttgcccctcagccgccctgttaatctcatcctgtaacccggcttcgagcagtccgaagtccaacccttcccccatacttcctcctaatcccagcccgaccactcccgcgcccaaaccggaccctgtattcatccccacgcccacgcccatgtcattgtcgttagtaccattgccactgccattgccattgccgttgacgttgacgttcccgtgactcgtccctgattcataggccgtaggagaattcgccacactgttgatgaattcaaagagtgccatctccccagcatccaacgtgggcaactcggaagggtcaatatccatcccgcccgcttcgcgctgttgttcttgttgttgttggtgggcttgtccgtccgtggtaggaagaggacgtgaagcggtttcgggtggcgcgtgggtctgcacgccaaatgaggtctgatgcgggatgatctcgactgagggaaggagaccggcgaggttgaccggttgagcgggggaaggagagatgacgatgggtttcgtctcgggttggacgggtgtctcgtccaccaccgatcggggtcgggggtcagatacgggttctggttctcgtttggccggctcgggagaaggttccttgatcggttctacgtagacctctgccgctcgattctgtttcgcatgaggcgggggcacggatcacaaagagcacacggtcgagcacgtcagccctccccaaccacaaaaacccccggtcaaactcccgctcccaaccctgttcaaaaccgtagcccagagggctgactcaccgtataggaaaccacaccgcgccgcgtccgatcccattcatgacaagcgctccgataccccaagatcatgtaactcggagcgtgggtgtaaacggtctgtaagttcctactcggtcgtacccaggcgacaggcggaaaggaggaagggatcgcgggaccgtgagatcagagttggagataagcgagggagggtggatgaatggggaaaggagaggaacaagaagatcagtccgggaggtcggggagtcgttgatgctcggccccgaggacgacaaggcgtatttggggtgccgacggaagagagagagcgagggaagggaggacggtggacttgcctttcgagtacctcggcgtgccatttcattatcgtcgcccgccgtacgcatgctttctactcgacacccgtataccttgaatcagcctgacgttcaactcttctcccggtgagtcggggcagtccggtccaggacaatccgggggttgggaccgaccttgtaactatcttccatcgactggacttggttcatcaaccatgcttttccaccgtccttgctattactgcgtttcttggtcatcggcgtcgtcatcgcgggctgatcgcgatcgggttgatgggttgaacgacgactagcgaggtcaagttcggccttgtccgatttccgttcgagctcatgcatcgtctctcccccaggtcgagaatgggggtggagggtatttcctaatcgtcgtagctattctcgaccttcccatgcaagatttataggttgtgggcctttgcatggctgtgggcgtttgagtggtatatgaacaaagtgagagagacatggtcatatccgagttgggctagtcgccgcgacccgctggtgaacacgtgaaagaagggggaacagggagagacactcactcactcacatgtgcacataggatatcaacttgtactcgaatcgactaccactctagaccaagatcacagccgatccacccatctcacatccctcacgacatggccaataaacgccctcaaaccctattggactcgatcgatccagacggtgacgattcggacgatcgagacgatgtcgactttaccctacctgaaactcgtcgaccgagtaaacgccggaaattacctatcgaggccgtctccgcgatggatctttcattacagcacagagataccgcggcggctagtatcaaaaaagaggaagagcaggaaaagatgaagttggaaaagaagaagcgcggggaagaagagtgggagaggttgatgcggctcgaagacgaggccaaggcggaacgctcccggtcgggacctagcgacgaaaccgcgccgatcagatccgggggagaggtcgagatggtccgtgtgaaaagaccgaggaatttcgcgggagaagtcatctagcaagtctctgaacccagccttggtagcgtcccacccgtgacccgctcaagaagctgatcatagggtttggtttggctgctggtagtgagacggtcagcctccctgtcgatcatccggatgtcagacgatacggccggacgaccgccgcggagacgaactcggactcgacctcgacgcagcgagggccggtacaagagactatccctgaggtcggaccgggtggagctacgtctgatttgtcgggaagcacgacgacgactacggctagccccgatccttgttcgctgccttcttcgattacgaacgcgaatgtgacaacgacagctcccgcccgacccctcccgcctaaacgcaggaaaccgcgtcagtccctcgagagcatgaacgccgagctcgtccgtcaagcttctatcaagaagatgtcgacgtttgaaaaggtacgcccgggtcccctcttcgcccacggaatttgtactccgtcaggcttatcgcgtatccacacccatctcgacgtcggatccgggggaaacagagtcagatggattggaactcgttgacgagcaccagcgactcgctctccaccgaactcgaggcgaatcgacgtacgggtgggttcttggagaaacaggatttcctcggcagggttggggagaggaaggatatgcgtgggcagggtgagctagggccgagacgacgggttgggtagggacgcaagagttgggacgagacccgggggttcgggaggatacgacgacgtgcacatgtccatctatgtaattcgtataaccatcatacccctcaatggacctcgagtccagcttttttcttcctgctagaagaggatgcgagaggaacgtccgtttacaataatccccgtgcccacaccttgacgtctaggccaacaagctctttccggtcatggcctcgggttgaggcaagccctaggataaaaggaagaaacaacatgcgagtcagttcttggcctggttgcaaaactctacccatcgaaaacgaggactcaccatgacggcgaggacggtaggcgcgacgtcggcgagacaacctccctcctgcttcaaggggaacgaggtgataaagggaaccgggttggtcgtgtgcgccgtgtgggggtttccagtgacggggtcgagcatctgtttgacaaatacccaaacgtaccacgtcagtcatcatctgatccaccccacacgaggtctcccgacggaacgacctacctgctcggcgtttccatgatcggcggtgatggcgatctcgtacccagcctccatacaagcgtcgtagatcgtctggaccgccttgtcagtagcggtgatggccttgacggcggcctcgaaatcgcccgtgtgtccgaccatgtcgggaggagcaaagttgcacatgacaaactcgtacttgcccgactttaccgtctcggccacgctgtccgctacaccctgagcgttcatctcgggctgctgatcgtacgtggcgaccttgggcgaggggatcatgacgcgctcttcaccctcgaattgcttttcgacaccgccgttgaagaaaaaggtgacgtgggcgtacttttcagtctctgtcacggcgcgaacggatggttatggggattagaaacacgattagcggggagcatcggggtgtatgtgtgtgtgcggcaaggactcaccggcaatgtgacactgcttgacaccctgcttgcccaaccactcggcgaggacgtcgtccatgctcatcggggggaacgcgatggcgaacgggaactcggcattgtacctcgtcatcgtggtaatatgcaaatcctcggggacctcgacctccatcggtcggtcgggcagaccgaggacggtgacgatctctcgaacccggtcggatcggtagttgaaggtgaagatcgtgtctcccttttggatcctcgactcggggcttccgcagatgatgggtttgaggaactcgtccgtctcgccggcctcgtaacgcttctcgaccgtggccaaggggtcgtcggatttctctccctcaccgctgaccaaaccgtcgacggcgatcttgacacgctcccaacgcttgtcacggtccatggcgtagtaccgaccgacgatggtcgagacctcgccgacaccgttctccttgatgaaatcgagcagctgtttcaggtatccactggcagacttgggcgaggtgtcccgaccgtcaccgaaaaagtgaatgtagacgttggggatcccgtgggccttggcgactttcaagagctcgaacaggtgcagaatgtgggcatggacaccgccatcagagacctggtcggtaggcgggacggtggatcagcagggtgagacgagtcgggcagatgttcggatgagggtgcttgtgtgtgactcacgagacccatgaggtgcaacctcccgctgttctccttggcgtgtttcatggcagcgacaatgttgggagtatccttgaactcgtccttcctgatggctagagcgcgagagacgtccggagagaccccaaccccaacatcagtaccacactcccgaaccccatccttgcgctcgagcccgacactcactctgatcgatcttgacgatatcttgccagacgatcctccctgccccgatattcaaatgcccgacctcggaattacccatcaacccttccttgagcccgacggccaacccgtgagcctcgagctcgacgtggtggtgcgtatcacggatcgtgtccatcgaggtggtcgtaccgtggaagacggcgttgcccttctcgttcgaggagagaccccatccgtcgtggacgctgtgggagaggtgagggggcgggtcgatgagggtgagcaacgacgacgacgacgacgacgacggctgggtacgaggtcagagggaggtaggcgcgactcacatcagacagaccttttctataaacgtaatcgcaatcgcaatcgcagacgtagcggatccgatatcaatcagcgagcgattctactagcgatatgatacgatacgatgcaacaaagagatggccgtatagggatacggggatgggcggcaggacgactcacttccagactcgtgggtggtcttgacctttttggtctccctaggctcgtcgacggaaggagctcggacgtcggacatgtttgcgagggggtgttcgttcttgtctagagtggtgggtttaagggtgttgattttacggaatgagggtgtggggatggtagggggaggacgggaagggtcatgtagaggtcatcatctggataagaattgtacaaggtggttgtggggtggaatgggttgatcgcaattgaaccaatctcacgcgcgcgcccccgaaagacacgagagattcgtcgatgggctgaaggggggcggtgtgttcagactcgaatcgcaatgtacaacatgtttgacaggctctcgtcttatggtacaggacggatgagctggacagggcgagtcgtaaagaggttgcagacgggacttggacacgacccagcttgagaccaagtgaagattcaaggcgctcgctccctgacgatttcggtagacccgaaaggcacaactgatcgacagggcgtgactcgacatctcgaccgggaacatttacatcgacaatcctcctctgcatcctgagctcgtattctctgagcctttttaggaacagacggagggcggcaaagcttccatgatggatcggtcgattggaagtgactggcgaatcgattgttcatccttctcggtggctatctgattcaatgcgataaggggtagcagctttcttatcaatttaatcaacggggtccgtacgtatgtgatatgaaatgacacgtcataacctattcagtgtctcccagcccgcgagtgttcctccttaaaacttgtctcgtcctttccgaaaacgggtgaaccgggggcacgtcgacgatcaacctcacacacacacaaggtcatccacaacgccatatccatatcaaccatcctccgtcgtacccccacacactcctccacgtacacccaaaagagccaccaggacctagactctctagacctctctcaaactctctcaactcgtcgtcatgcgtcccacttccgtcgctcgtgctctccagggattgatcccccccaagatcgctaccccttcatcggtcgtgagtcaagtcttgcccaaagcccggttcatcgccgggggggaaagttgggaagcttacaccagcgatcacttgtttcattattttcctttgtccatcggtgatacctcttcggaaccgaccgttttgcggtttgacgacctacaccccgacccgccaaacgccaacctcccctgactcgaccggccgcccgacgaacctgaacctgaacctgaacctgaaaccgaacctgaacgcacagtcctccggagcttcctccctccgaacggagaacgtcgtagccttctacaagtccctccccaagggaccttctcagcacaaggctggagggttgaggggaaggtatttcgagggaaagaacgctagcgggtgagtcgggtcgggtcgggtcgtgttgattttcgtaggatccgagcgagggcgggatgcggatgagggtaacggcgacgatggagagttaaaaaccggagtgaatgtgtcttgctcgggcacgccgttaaaagcatgacgacgacttcaggcttttctacacagccctggaatacccgattctcgccgcgatgaagtcgaactcgatgggagatgacacaatattccgaggcgcggaaactgatctttcattctctttacattcatctctcacatcgtcgtgtcaatccgaccgctcgacgaacgtcatgttggatccgccgcggactttgatcacgatcgacgtctacccgtcttcaacgcggcccgactcggactaccccctccattccctcatgaacccgaccccctacgaccgcccgatcgaacggacaacagcgcacccgtcttggccaccatcctcaccttgttcggaatcggatacaccgtgagtcgtcgtccgggcatgtcgctccctctttcgctcgcgtacaccgttcgattcgctttggatggggaactgatgtatgcctttttgttggttttgctgggattttgcagatcgattaccagagtgagtgatcgagaccttgtttagagggcgggagaagatgaggagacacgggaggctgggattcgggccatcgagaagaaggtcgggctacggggaaagaagctgattcaccctactcgtcatttttacttctcttttcctttatatcagtgcacttgagtgagtccatcttggatcgtttttgatagtcgatacgcgaaccggacgcacgctcatcgaatccttgttcatcctcgtatcacagagcaccacaagaacggacaccactagacgaggagatgcagcggtgggacgaccagggagactccctttgatctgcgagtcgtcagtctatacctcatcccccgtttccacctcgcacgtccgctcgtcctctttgcgtcatgtagcgaaatctacgtttgaacgtcgagatgagcaggatggtcgggtcggaagcgggaggtgcacggtcgggcggccgggtcgtgtgtatgagagggatgaagagggcgtaaggggaaaagggagaaatatactatgaaattcgcacgaccggacgcctcttcgaggggggctcaaaacaccacgtcttttcgaatcgtccagcgtggcatacgggtacgacgtacgaattgtctaggtactacaacgcatttccggcactctcgccgtcgtttacagggccacttccgtcgtccccgtcaacatggcctcgttcacatgggattcgatcgatttctcgacctctttgagcgtgacatcgatcgtcgctcgtactggcgccgagacgcggtgcagagggtctcgagatcgagtcgaaagtcggcgggcgagggaaaggggactcgatcggctgtgacgcgggtgaagttcagtgatacccgactcgaacccgttctgtcccttgatccaaagcatcgtcactcacatttgtgtcaagatcaacccgaatgcgaatagccacatcgcgttgccctctcctatcgtccaactcgatcgagggccgagcgagtgcaagtgtcggcgccatcggacaacgatcgctacgagggagatcgtcttgacgcaccccgactggatcgccgcgacaaagaggatccgggagacggtgcgtgggtcccatccagtccgaactgagtgaacacgattcccgtattgaggatcaacgatcgtcctggcttcggatctgagacgatgttactcacgaccgaccagaccgatcaatgtcatctgttccgtcgtaccctggaacaaccagagaaaggccacttccctcaagacggtcgacggctttcgttcctgttcgtgatgcaaatacgcggtgctatgtaccaagccatccgagtcaatgcgtcgtccatcactcgctcgctcggtcgacgctgcagctcacagtcccatagcaagtagatgatgcgctcggctatcagatcgatgattacgatcagtcaagggcatcgtgatgtgacggtgtttcgactgacgcgtggggtttcatatgccgccgatataacaactcgtatgcgtctaaggcgtggaacgatttgcaatgtcaaaatcagcatggatcgttaacatctcgattgcctgcttacaaaggaccgagagagacgtgctcaggaatcggatatcgccaacttgatcgggccaaggtcgacagagtggaccgtgctgacgatgcaatgcaacgtattcaaagcattgtatagcgaggatggcagtagtgacgacgatctttgtcagatctataaaccgttcgtatgagcagggtgtgtctcgaggacaataaggtctgcttacgaagaggtaacagatcctgctttggcggttgaacgcgatgtgcttgttttcgagttgaaaattgcagataccttacaagtcggagcgatgtcaaattctccctcgatcgagaatcagacgctcagcctggcgatctgacttacatctttgtgggcttgactgctaatcccgctatcgtgccagaaatcactgcgaatataagacgcgacaggcaagaacttaaatttaacctaactgtgcggtcacaccgggtcaccgaaatactggctcacgaagtacctgcagaacgctgaaactaaacgcaggcaaaggtagtgactggtgatgcattgctcgaccaaggtctcgggccgaatatctgtcaaaagggcagtcctgcaaagtggtgttgtcgtctcgcacgaatgcatgtcgtcgaagtccggcttatatatcacgggccgtggctctctcacgaaggatcgtcggctggtttcgccgattagccttcctttctgaacaaccggacgagcttcttgccgagttgatacgcgcttgtgaccggctgggcgatgaaccttttgttccgtgaaaacgttttccatgatatcatgccttgaccgcgggagaagcaaaagaacgttccatcatcgcacggggcgacccgctgaaacatcgattcgagtacgtaagcgcgagcgccgatcatcacacggtctcgcggaggctcgtcgctgtgtgctacgggccgacagcggatccactaagaagaaccaaagagtatgcgtcttggcgagtgtgccgtcgcttgtcggtgctaccggtaccacactggtgatcgaaatatggagatcgacgtgatcatacaaaatcggtcgatggatccggcagtgcgacgctgcgcatcatccgcaagccaggtagcgtcctctgaccccagcctgaaggagggcagaacatcgattgtcacatactataagcgtgatactcgtcgacatggaggagccctcttcgtatcgtctacagtcgaccgtccatcacgttatgaatgctgctcgttcgatatctcaaagcgcgagcgtactattagggataatgggtataagggtgtatcgacacggaaacgctctacaagttgattatcagaacagggtatatgggtatgatctaaaaggaccagcgcttttgatgggacattcggctaccaggcgatcttggcgagtaaaccagtcggatacgtgcgaacacagtacttccgggcttcgtcaagcatgacgataaatatcgcaaactgtcacaagcagacaggtccatcagtaacaaatcgacgatcatgtccatctaccagccacgactcacggcaaagggaaggaaaatatgctcgacagggacacctcgggtcaagaaggtgttctggaagaacggtacgtaactgaaaaagaagcaaaaggccaagccgagtatcattgcagggatgatgtacttgttgctcgttcttgggttgccgatgaaagggtgctggaacagtgacagtctgcgggttcgagtggccaggagatttctataggcagaatagatctacaggtcagtctcgaattgcatggaaccgaggtccgacgccaagcttacccccactgcatgatgacgagcgtgaaaaagtagacgctctgtgctttgtacacctgctcggttacaaattcgctgttgagtccgcctcggaagccaccataagcggcaacgatgtccttgaagggaacgccattccgctcgaggtacctgtaacgctggcccagtcagtattgtcttgctgagtatggagtggaaccgacattgctcaccagaatgccatgctcatcgcgcagagcgactcgaacactccgagtaccccgtaggcgtggagcaaaagcttccagtcgaccaatcggtcggtcttgacattccgaggctttcgggtgagcagcccgacttcaggcttctcgaaacacaaagcaaccgccgcaaagacgtcggttacgacacagatgaggctagaggattttgattggagtgagtcgcgaatggatgcaagacgatttcacttgaagctcacatcatctgaatagaggatagggcttgtggcagtccaaggaagacgttgaggaggataggcatcagttcggaaaaagatcctgccggcaagagatatgtgacggtcttttttaggttgtcgaacaccagccgaccgtattcgaccgcaacgacaatcgacgagaatctatggtgatgcgctcgattagatatcacggaagaagcagttgcgatgcgtatgacctgagcttacgattcgagctataggccagagcgatagcttgaatcagcatttgcaaaagagcacaatgaaggcagcgcagcttaccaggattaagtcggcgctctccatcgcgacgtcagatccaccgccaatcgcgataccgatgtcagcttggctcagggctgacgatgtaccagatcagtacccgtttcggcatacaatgtcttccggtggagcgtaccaggtgcatcgttgaccccatctcccgtcactgcaacgatgtgttccctgttctgtaactctttgacaattcgcagtttcatttcaggagtcattctggcaaagacgatctcctcgtatccagtaagcgcttgctcccattgcgattcgtcctttatgcagcgcgtttcagctcggccttgtccgggaccagctatagaggctgcttaccatgctcatcaaatcaggtcccgagagcaccaagctcttgcagttggcaagatcatccatgtcaaatcgctcgatcttgtcaacatcaaagttccgaccgaggtcgctcagcccatggcatctgccaggattggtaatgatggcgcattgccgggcaatggcgacggcagctgaaacgagcgattggtctttggtaagcacttcatccgcagggtgattgagactgggagagacgaacttagcgcaaaatctccagtcaccatgcagactcgaatcccagctccgcgaagtatcttgattgtttctgggatatcactctttggaggatccaccagaccgactagacctacgactgtgaggtcgatgttgacctgtatgttcacgtagtctggaaactgctcggagtgcagcaagtccgacgtaatctcggcctcgcggaccatcttcttggctagaagtagcacgcgttgaccctgtccagcccatgactcctgaacatcggtaagtcttctcttgagctcgctggtcaattccaccgattgtgaatgaccgggtaaaatgattcgagaacaactaagaaggttttaacagcgtgagcgaaatgaccggatgcgcgcagatggacgcccctgactcaccgagcgaggagtacgtcgggagctcccttgaccagcagcatatagtctgtcccatcaaaatcgactccgtctgccatcagcgcctcagcatgtggtttgcccgacgctgctggtctcagcaacttgaccactggtatcgaccatggtcagccctccgaaggtggacttcgtggtgatcctttggcacttactgtgcttggtctttgaactgaaagaagtcccatacacctcgtgccattggtctttgctctcttgcactggcctaagaatttcagcaaaccgaaggatggcagagtcggtcgcgtctccgttgactttgcgcaactctgcgggttcgttcttgccagcggcatcgaaagtagcctcgttgcagataccagcaatggcggcgagttgtatgacgccatgcgatcgctcatcagacgtagtcaaagaatcccgagcttgaagcacagagaattggtcgtcaagtatgcaagcgttgaccaccgtcatcttgttctgggtgagggctgagggcaattatcagcccagcagaaaagacaagagagcggtcacgacttactgccagtcttgtcgctcagtagcgtgtcgcatgcgccgagtgtttcgacggtcattagactcttgcacagcacctttttgcgagcgagactattcgctacgatagctaaagacatggtgatactggcaggcagtccctctgaaagttgactcaagtcagcggcattagaggaacctctccgaattcaggcatttaccaggtatcattgcgaccatgacagagacgacattgatgaccaaagccgccaccgagatgaaacccttgtgcttcttgttcaaccaagctgcccaaacgatgatgactgtcaaggccagactcaaggctagggaggcgatgatcaggacgaatctgtaaatctccttctgaagtgtagtcgacccgtgcgctttagccttgcttgagagttgggcgatgcgaccgctgtcgtgatatcggtcagccatcgcgacacatgtcgggacgcagtgcccggagttgtaaactcacaagaccgttctgtctcctgtctgaatgacgatacccttggcgcttccgctgacacagagggtaccctgtagggcaatattcttggtctctaagaagttggggtcggtagaatcaatggtcccggcaatcggcaagctttcgccggtcaagatcgacctgtcactcttgaagtcggaagaaacggagatgagccttaggtcggcggggatcttttgtccaagccgaagcaggacctgataccggcacagcctgtattagtccaagcacacagagaaagtcgaagatgaagctcacgatgtcaccgaggacgagatcttgagcaaggatctcttgttcgacgctatcacgaacgacctgaacactggaaggcagcatgccgctgatcgaattcatgacccttccagtggagtagtctaaggtgatcgatcaaaatgtcagccatttggtggtctaccgggcggcgtcatgccatctgaagcataccctgccaagcgttgaatgcggtctgagtgatgataacgacaacgataacgatggccaaagccaagttggcgacggcgggcgcagggtctcccaggggtcgcctgagtagcacatggtgttatgagcgggtgacttgacacaggctccgatgctagctcaccatgcgatgaagcacagaatagaagcagtgaacaacagagacccgaagcctccaaagacataggtcaaccacctggattttcagactcaggtcagtgactcatgtcgaggctaagcacacaacttttctcactttcgcaacaggttcctaggaggcgggctgagcttattaggaccgttttctcccagcctgcgcttagcctgagcagagtcgagaccttgagtgccgctggtagagaatcggcgtaacaactcctcgatcgacaagatatggtgatcaagggtagcaaggtctgtcggcgtgaggaacggtcagcgaatccgagctgcgcctctctcgaagagcgaccaacctttcacctccttctttccgcgacgctgagcatcaccgagcgcttcactcctctgggtgtccttgacacccaagctgagggtacggaagtcagcgacggttctggcctcacggtcacctttcatgggacccgaggccaggctgatcgagttggtcctctggatccgaaggtctcgacccctctgttctccgccttcagtgtccttagtcgtaccaccggtaacatgttcttgaatggtcaggctcctctgatgccttccaccgcggtgaggataaggggcttgcgagttgaggacgaccgaacgaacaggcgcatacgccgcatcggatgtgaccgattcggctcgacttaggtcagggtccttcaggtcagactctccatcgtatgaagctttggatttggacattacgtgtctgccagcgctttgaaatcagaatcgttcgttgcacaatatcgaccgggtctgtaatcacctggaatttggcgcttgtaaatagatgggtaaagactaagatagtgaacggatagatctgatgcatacgatctgactctggcatactcataaacgctgaatttctcgccaacctcttatactatcctgcaacgtcttcacacattcaatttgtgtccttttcgatcacggtcgaccgtcttttcctgagcgtacggacgatttgatctcttcattttggctgagcgattaaagcgaccaatggccaactgcccggacccctgtgttttcggacggcggcgtattgtcattcctcctcacttgaatgggttcaaaggtggcacatgtatcccctggccagaaatacgctcgagggtgtagcgcatttacctgttgtggtcaattcgaggagcgaaatcagctcccccacttccccggattgttgactttgtcgctcgaaacgcgttttgaatccgggcgaccccgttttggccaatatcgcgcagctttgggcgaatcagaattcgagcaggtgaggaaatcaaatggtgacacggacgacggataataaaagcacatgcaccacagccctgggtcaattctcggacatgacggcacataggtcttcatttgatttttgagcaaatcggccctctgatctgcttcctggtgagaaggggcccgtacggtcatcacgctcatcttgtcgtccatagatcacatgtgaaaattacaaccggaaccgaaaacacgatcgaacaacatctacgccttcttcttcggctttttgttcttgctatccttcccgcctgtctcgcctgccttgcgcttccctgccgtcttgttggacttgtcgcccgtcatgacaggcttcgctcccttgacgctgacgacggtcgacatgccttgcctccgtgatgggtccgctttactgagtgcctcgacgtgagcttgcgcttcggtgaaatccgtaccatcgtcaatagcgtatctacacaggcgcaaaagttcagaatctccgtgatggacgtgaattgcggacggccgggctccagactcactgagagaggtccatggaatcaatcaattcccgctgcatcgcccgtgcacgcttggtttcctcgtcgacaacctcctccaaatcctcctcgaccgtggtcttcatcggcttccaatcgctggttccaaccgcgctgctgtcgccctctcccacattccttcggacagtaggctcttgctcgggtacatcggctccgacagccttcttttgcagatcgtgcaagtggcggctgaacttgcgcatgatcttgacaaagagggcaagaccctggttgacggggatgttcaattcccgctcgacgtcttcgatcgtctttcgttgcagaccgagagccagcaagattgcctgttgagccgcagccaggctcgtatcggggccaaaccttcgggtgaagaacagagaggccaatgagggaagcaggtcgaggatgacgtgatagtcgagcatattattagagtaggagtcgattcgcttgaggtcaaacggagtgaagagatttccgagctcgttaggtgccaggactatattaaaagggcatcagttgactggtcgaatgccaaagcagagtcgcaactcaccgctcgcagattcagcagactctgccgcactagcaccctcgatcacgctcagagccaaagcagcctcgaactccctgaacttgtaagagagaagagacaggaatcgtcgtcggaagtctagggagaaagggtaatcagcgtggagtcttgtcaatcggggtgggtgtagctcaccttgagcgaaggcggcaagccaattcgaacttccggcaacatcaccattcaacgtcttcaacatgacgcaggtgtgttctcctgtcaaatcgttggcggtctgtcgaacgtatagaggtgcgtatccagcccgcttccaaaatcgcagcaagtctttggttagaccgtacgacactccgaggtaatcaagctgttccggtcgtctctcagacagacgctgaaggagaggaggcattttgttgacgtcgcggacgccaacgttgtcgttttgcagggtggtatcctgaatacggtgatgatttcatcagtgcaactcgggctttgtatgtcgcccaacagaagacttaccttgtcgatcttggtagcagcctcggcaaaagtctcagcagtgtcctcttccatgacctcgtccagattgagcaaatctccggaatagaacgagttcaacgactccagagccctggcaccgtatcccatctatagaccgcgtcattagctaggaacagaaaagtgttgaatacacaaagtccagctcaccctagcgtaatcaggatgagttgcgattcgcacaactcgagcaccggaaagcatcgcaaagtcgtcatcttggaactgtaaagcacgacatcgacatcagtgttcaccctcttgactggtcgttcttcgggcctaatgagaactaacctgctgagagaccagccaagggatgaggtctccaccgctcctggttcccttcgccagctggctcatgatgtgctctttggagatgtttccttccagagcaacttggaccacgaccaacggatccggaagggtagactcgtcatccttgaggggaggaaggaggacaaagaggtggtgcgcgggagcgtccgacatgagctgcaagtcgttgggagtgttcttgtagtgagaggccacatagagagccatcattcgctggaggaagacttctgacgcgggatgatacgagaagagagtgtctcggttcacgtaataaagttcacactgcgaagggtgagggcatccagaaatgtgacgaggcaaggtggtagcgtcgagacacaacaaggcgttgagccatttttcgacggggtctgcttgtccataacgaatgggctgctccagcttgatctcggcgagggaacgcgccatgcccatcttctgaccagacgtgttggtcgagaccgacaccggggcgtcttttccgatcacaggtcgcgtttgctctcgcagctgctgaatcagcttgatggaaagacttcgaccagtaccttcgtaaccgttgatggtagaggccatgaaaacgaggtaaggtccgagaagttttctcacgaggggcaaaggaatggctgcggcctcgtcaatgatcactagctctgcttgacccaaaacgtgcgagtcttgaggttgaatgtactgcacaaggcggagccgatatgagtcccctgttaccagactggaaatttgcagtacacgctcacctgaatagtctgtcggtgacccttgaagatgttcactcgaaccacagctcgaccccactcctcattaccggtcctaacaaagtcataatccagcgtctcctcgtagcccaaggcgtccaaacccttcttgacgaattcgaacagcgtcttcaagttctccggggtaggagacgtgacaaagatgttggaatagtcgtgtgctactgcagaggcgatggcgagacccaaagcggcggattttcctcgtccacggcctgcagtcagggagacggtcgagttcatctgcttggaggtaattccgtttgaaacgaagctcaagagagccttgagttggtcggtcgtagcgcaaagcttggtgaggggtccgataacgggcgtttcttttagctcatttttaagcgaggtaagctcggcctgactagcggtaattcgcgagctgggtccggcgttcgggttcgcaacgatatcctttccggccgagatcggcaggacgttaagctcgtcgttcaagaccaaacaagccgggttgcctcccaatgacaggatgaatcgttcgttaaatcgaggttgaacggaagagtggttctctgttcggtaacgagagtgcacgtcctggtaggttaaacgcgcatctttcagtcatcacaggcgaaaagctggccgggatcgagacaaacgtaccatgctcatcgtatagagctgtttcaaactcgacatgttcttcaaaagcaagcagacgacaccgccaccctcgaccgtctcgatcgtccttgcgagcaagttgggcgtgatcgcctcgtagtcctgcaatacgaggaaaccgaaagtttgacctagaatcttgtgagactccttgtagtagctttttcatcagcaagtacggagatttagcttcgtaattcatcattgctctgatacaggaagccagacttacttgtatcgaatatcggtgaccgctacaaacagctcgaacgggctctgctcattcgcctctcggatccctcgcttaacctcattcttgatcttcttctccctcttcttcctgtgacttgtgaatcctaaatccttcttgtagcaccacaggacgttcggtcgagctgatactctcgtctgggacagcaagaaatgcaagttgacgacctggtctcgggcatgatctccgatgaggatgaagaaggatcgatgattgttagcgactccgtttgaaataagagccgggatccgggaatcgagttgtttcctcatggctggtgggatttggttaaatggatagcgatggtttctagtcaatggaaagagcttagctacacttttgaatgccgggaaatctttgaccaagcgacacccaagttcgaatgtggaggtcgatattcagaaatctcgatatcttcaatcgcgggtacacggacttgtaagtcgatctcatgtccgcgctacacaaattgactactttcaatcagatctcatttgaacactcaatgtaggcgataaacgttcatgctgggcgttaaatttcgtgaataccgtcgtaaggtggagagtagagaaaccggaagactcgaaatttgggaggataagaccggtggcctttgagtggcaagtaagcaagtgctacaaactgcggagcccgcgatttgctgcatcggctgtggttatggcggtcctgcattgatcgcatacctgagcaagaatgtctatagacccgccggttcgaatgcctctgaccgacgatcgaggctcgcgtgcgtagccaaacctggatttgcgacctggaaaagattggatgcgaaaacatagtccgcaattgtagctctgtagcaacgctttccacaagtgtggcggcagatcaccaggggcctgttgcagaacgatcgccgcttgctttgtggtcaagcttgagtaaatgatatccgtagggacatccggagcgatctctacctcgaacgcctcagcgatctggcaaaccttgaggggttggttgctccacagaaagttggcggtgatctgcgagaggattgacttcttgacaaggtcaaccaatgaagaagaactggtttgatttataagaaagtaggcggaatcccgattcaggtagacgtcgcctggatcccaacaatccttgagtaaggccgccttccgtttgactgcgaccgagatattccggaggggcggcttgcgaatccgagccttgaaagtactgacagatatatttgacacccaggcggaaggaacatcaccatggaagtgatcgaattccttgcagacttgaatttgcggtccacagagcttttcaccagcgaaacaccgtatggcggtaaagatgccgaaaggaatattagtcactaatcagcggagagatattgacggcaagtcagcggcaaggacgtacagtctgcgtcagctcgtatcaatgcttaccttcaatcatgtcattcccagtcaggtcgaggaaatgtaccgagcttcggtatagatggaaccgagacgatgtcgcgctatactgctttttgtcgaatcctgaccttaacatcaagggttcgtcggcccaccagagcaggcaatcaatccattcgaattcattgagaagatttggtgacttggctgacgaaactaagaagctcaggtcgagcaccacagatgaagctcctccaagaacctggtgaagaagtagtctgagcactctctgctggatgtcgaggttgtgtcgttgaagcagccatctagggactggatactacaacgggcattgcgaatcagctatcggtctcggataacgtgtagactgtgtctgacaatcacccttgcctcataagagcagacgtctagccagtcgggcgtactgacgacttgatccagctgcgtgaagaattggacatttgctctggcctcgcttcctgaaagctttgagcgatagtatgcatcattacggaatctgtcttggatgtccaacaacctgcgatagacccaagctatcaggtcgaattagttgcgaggataatatcgactttccaggcgaagcgagcatggattcacccatagccttcttcgcgggtaactcgactgtgtcatctttgacggccttccccttctgatggatcgccagcgcaatgagagctttgatggcggtctgccagacaatagaatgagacgtctcgaagtatcgaccggccaagtaggggtgatcgaggtagaccaaagcctccgacagctcgaatagctgtaggtgaagagctttgatcttgcgcgaaatgctttcattgataggcctgatgcgctcaggacacgtcgtgacttgcttgtcaaacgcccggttgggattgacgaaaaatccggtctcgctcgatgatgtagaggagtctgtctcagagtctgaggagccgctcgttgatagcgactcttcctgctcagaagaccatggcgagtcactagtagactcatcagccatgatggccaatccactagtcactcgtaatgccggccaaaggggagaccggcggatacttgtgctcaattgacagtagggaaggagcgatgtagtagtatcttggacatatgcctagaggcggaagcaaaagaaaccgatcatgacgtttgcgtccctcactgatatgcgaggcactctcatggcggaaatgcttgtcatgacgaacccggcgcaattgcggttgaagaggtctttcaagggactcgtgacattatttctatcccatcaagggtatatcacatgaacattcgactgtacaagccacgacaactaagaaaaggacatgggttgatcgtaaaaagaagaaaatggtcagatcggttccgggtgggttgggtaccgacgacggtcgtgaaaagggttggttggcgtcaccgagtctcgattgcagttcgttcctattcgtttctctagaccctcctgacgaccttcttcaagcctcgggtggcccttcggacgagaccatcagcagagtcgacggtgacggcagagtcggtggcctcgggtgcgctgggctcaacgtaagaggtggcgtaggcatcgacatacgaagtgctgacctgctcgtcagcgtcgacagcggcggcagagtcgacggcggaaggttcggcccagtatgagtcggtagcggaggcagtggcggtaggagtgaccgaggcatcgtcggcagagacagactcggtggcggaagcccaggcgtcggtcgagaaagcggattcttcgggaagagccgactcggtactgttggcctcggcggtctcgttcaaggcagcggtagagttgacagaggagggagcgaccatggtaccgttgaccgaggcggaggcctgaccttcaagctggtactcctcggtctcttcatcatcgcactcctcgatctcgccatcctcgttgtaggtagcctcatcatcctcgtagacggtgtcatcctcatcctcccactcctcacagtcctcgtcctgaatcgcaagaaaaaaccaaatcagcatgcaagcttcgatgcgaacaacaggcgctcgaacgagttactcacgtcctcctggttctcgccagactcgacaacagctccggatccggatccggtcgaaacggcagcaccggcagaggcaacaggggtggcactcgaagagggcttgccagtggcgaccaggttttgtccgacgaccgaagtggcagtagcggcggtaccggtgggcttgctcgagccggcgccagcagtgacagttacgtatttagtgacggtaacttgaccggaaccctgatggagaagaggaaagtcagtcaactgggacgcttgactccatttccttgagaactcacgtcgcactgggcatcggcatcggcggaagcagaaggcgaagcggcggcagcagtagcagaagcaccgacgttgagctgacctccagtggcaacggcgttttgtccgatgatgctggaaggggaagcagtcgacgcagcctcatcgtcgtagttctcacccgattgccaggcggcacccgagtcaggcgagtcgggagtgtcgtccgagtctgaggtgtcggcagtgtcggccgaatcagagccatcggcgccgttggggttctcgggcgtctcgggagtctcggggatctcttgaccatcggtctcctcgcagtcctcttcatcttcgtactcgtcctcgtcctcatcgccatcgcacgagatctcctcgacaccggcggtctcgaggtaagtcttgcagtcatctacgccggtgcagacgacctgagcgctctcgtccacgatgtaggcggtaccgttagggtaagccaacaaggccaagtcgtatccttgcaacaggtcggtgatgttgaccgagtcggcagagatgtcggcgacgacggtcgtgttggcgttctcgagcatgaactcggtctcggacgagttgacaacggcgttcgacaatccctcgagagtgacgttggcagcggggacatcggtaccagaggcagcagcggcggtcgcagactcggtggcggtggcctcggaaccccaccagtttcggggtcgagcagggatcgacgcgccgtacgcaagcgtaggcaggacgaggtagagagcagtgatcattcggatggaggaaggcatctttgctagggctgttcagtggtaacttggtaaagagataaggtcctttggtgttgggcaaagaggtggctagatcggactagttgattttattttccgtaaagaggatcagaaaggcgggaaagcgatcgtgtcgtccaaaaaaggtaaagagtgtcgttggtgcgtaaaagctatgtcaaaatctctctcgacgtcaagccaaagagtagataaataagtaggaagaggtggtggttgatgacactcggaaaagcgtttgttgtggtggcaggcgatttgatgagtgttgtttctatttgtatggtagctaagcagaaggcaagggcgaacccatcggttagctcggtcgttcgtcgtcgtcgtggccccgtctctccccgtttgatcgcatcaatcactagatcactaggcagcaagcaacagcaccaaggcatgcctttgctcgcgggccgcgaccaccctcctttgagaccctcgaaacttaccttgtctagattaaagacagtgcgcaaaaaacttgaaagtcgacgagaaaatctaaagtgaacgtgtgtcggtggtggtggtgattgtcgagttgagaagggggaagtcgaaggggattaaccggtaatcgcctttgtcctatatcgttcgagtcgtagagttggtgagctgatgaagaagagaggaaacgtctagaattgatgttgtacaaaagagattgatgaaggtcgtggtatgaaaaggattgatgcaagtgtcgagcagcttgagaagcgaccgtgggctagctgctccctctccctgccgctgcccactgccgtgatgctccatcgcgtcgattcctttgttttgatcgttcccatcctttggaatgtgcttccgcctccctcggccctgtgcttattttcgcgtttccctcctctcgacgcctgaggcgtgacgatgcacacagcttggcacgcgcgtgagtcaaggccagggaaggggaaacaagggcgaccctggctcgcgtttcatccgaaagacaaatgactgcgatcacacgttccgtccgatggggtcatgtcaggtggacataagcgaggaatggccgcgcacaaagacataaagacagacaaaggcggaagcgacaaaggggtaacgaaagagttgatgacgcgccgtgacgtttcaccctgaagcgtgacagggtccacgccggggggcagccggtaacgatgacggctgcgagctagaggatggttctgtgagcaataatgttgatcgaatatctagccaaagagcggttttcgcatagcccagccaccttgaagacttcctttctccgtgaaagtggtaatgcaatcctggaccgtatttgctagtgtcagcgaacgtgatatgacgtattgcagtatgcctggggtcaccgcgtaattgcgatccttgtcatgccacgagaatgaatagctctcaaattgtcgtcatggtcatccatatgcacgcgacttggcctgttgcatatcagcttcgagcgagagaacgctttggctaagatgaccctgaatgagccgcgcgagtccaggggccgtcaagtatcgacgggtttagccgtatcttaaactgactgccaggatacaaaggcacacagggatctcgcgagtgatcgtctgcgaccgagtcctgaaacggacgaaaatttcttgatctgatccaacccctctcctcgtccccttcccgcataagacgaggcgatcacaacatgcggactccagaaattgcgcaagagaagcaagggatgcttgcactataacgtaagatcgatgctttcagttggggcttcaacgataaataggtgtgatcggggccaatgtacagctaccgcaaacccactgcttacaaggacaaggtcaacgggtatataggtaaccttcgatatggcaggcaatcaggttcaaatcccctaggatgagcagagcgaattctccgagagcgacgaaacccccccacgcctggcaatcacacgccggtcaatgaatactttctcgacctcttcagcaatcttcagcttgaatcagccgaacatccaacagtgagagacacagccaacgaaggtcggtctcatacagtacgcagtatctcatcacaagcgagtcttttggggacgatccaatctctcctcaaaggtgctagctccaggcgtacgcaccatacaggagagcttgaacgaacgacatcttataccgaatgacttggctggctcatccttcgagccgagtttgagtcaacttctcgacctggaggaatatacctgtcagcaaaagctatctcctggagccatagcggctcatttccgttgtcagaattgcacacaggaacatttggtcgagcggatgatggctggcgatctagaattgggagacgtacgacatccagaacctcatacatggctaatcgtgcctactctgagccgagtacaaggactgtcccgccttacccttgccgaacggaacatcgagatcttcagcaaactcatgtactgcagaagatctttgatggagcagctagtgcaaatcccgtcaggtacgacggaaggtgaagcgactcagcagtgtgtgatacaatatccggcgtactccgcactagaatctcttgccggcactgaaaagctatgcgaatttagtcaaggcgtctaattgggccaccgcgatcttcaactcatgctgaccgacttcatattccagtgtcagatcgaagagctcgtgtggcgttgtctccgttacttctattctcacgaccccaacaaaatccatctgacaggtcctgctttaccagagttcatcggtactgacgccatttgtgcaaaatcctggcggtcagctgtcaattgaaatatgcatagtgatcgtaactgcaacgttccactagaatatacaagcactctcaagattgctgcattgtaaaatctcgaggtgagatccggaggcaaatcgctagatgaatgataccttgtgctcatcgctgctagtcgaagggctagatactgccgctgccggcggattggttctctgctgattgaatcggtcacgttgcatgaaaggagcaaaagaacttccgttcctttgttgcactgggtgtcgcttctcacctctcggatataaatacggatcttaggccagcaattcaaacccgcataccaggctcgttacaggagcttgtctcatttctttattttccaattagtctgtttttgacgattaagcgaaactcgtatcagacatggccgaatcttatttcggagaccagggattcgcaggcttcgtcgagtcaaactacggcccgttggatttccagggtcgggctgtagatggtctctatatcggtgagcagagcatgccaatagagataccaggccctagcgaggtggtgtcccgggacgacgctatgacagagacttggtcggaatcgtattttggctttcaactgcctgataacggttctgcaggtttggggacggcctctccgatcgaagaagagaccgggaagatccctacatgcagcgaagccatattcaagggctatctcttaccaaatgaggagggggacttgtcgagtattagcaatgctcaccaactcacagtcgaacacactgttccagacagttacgatacttatcatgcgccggaagaccgaaatagcctttctagcgacaattacagcatgattggcggcaagatcacgatgaggtactcgacttcgggagtcgacctttggccaaagggtatgagtttagaagatatgagcgacgtgaatagattgcttccaaatttaccacttcaacggggcgaccgactgtataccaatgcggcgatagtcttgctcataccgtctaggcgaaaaattcgggagctttctgctcgactcaatacgcaagttcagagcgatccaaaaaggcccaaatccgagcttggcgtggattataaagccaggaagctgttcgggcgggagaatcttgaaatggcattgcctcaagctggccctcttggaaacgcctgcggatgcgccgaccagtggatggctgacgatttgctctggagattgactggacgtcagatcctctgcatgctaaatgatctaagctcaaatcgtcatttccgctgactattgatatgattgctcaaacgacagtttcactgcggcctcatcatccagaaacttctgaaatgggtgtatgcaggcggggacgtctacgatgggcttccgagcctgcataatctaattcccgattgtcccggacgtcattggagaatcatgactgacccaatggaaatgatgtaaatttcttgctgcgcacttctcatactctcctttgtatggctagtgacgtgattccacaagtggtcgccaagtagtactgctcgctcacgatacgtgcttcgaatctgttcgatgtctgagcccctgcctcgtctggcctttccgagatgcaatgacaattgtcagaggcgacgggaccccaaaagaaatgatcgtgaatcaaacgagtgggtatacctccgtgttttgcatgtgttgctcaatcgttcttgttagaacaaaaaccaacttctgttccgcgagatgaaacctgttttgcttgaacaaaagagaaaagggggatcacaccggtctcacccgattgcggaaacttgtcaggctgagcgcgccacatggtaactttgcgtccgagagaatcgaaagcttccgagtaaagcgagggcacacagcccgcggaaggaaatttggagtaagggccaggggacctcccaatgctgctccaactttggacaagtcgtcatccccctcgaattttccttgacaagaccagctcgcagtttagcagtcggcagttcatttttgtccatatcgtagtgttagcagcttagcagttagcagcgagttttgagggccgcatcgacatagagaccgcaagtaagcaatacacgacagagggctgcagatcatcactgtgctacgaaattccgcggcacggcttccaaccgtaaacaaagaccgtctttacaggatcaagagcaacaagcagcaaacccttcggaaactcttccagctactcacgagatcaacgtgcatagtggttctcgaggtacgaaaggcgtaaactatactacacacagtgttcgtaaaacaactacaagaggattagaagtgactttcagttcggaggcatattcgacactcgctatcgagagcgcgttcaagggcatatcactcggggccgacttgagttttggcctatcaaggacaagccaaaggagagaaagagcagacatgagtggcacatccgtaggagatgtgggttccaacctcgtaggatcatggaacaacggcttgacgtgagtcttctggatccgaaacttcatcctcgatcaaggggtcatcgggtcacgagaaaggagctgatttgacttgcctggtggttcgtcctggctggccattgggaactacaggtcgacaaaggctgtgggatcgcaattagcgttgatgagcgccctctcggtgagttgagaagctatcaactgcgacctcgcaattgatgggcagacactgatggcggctatttttgactctgctcttcgccctacaacccacacttgacttcttcgtctcgtccatccccgcctcaactcaatatggatatcaatcgcttcagctggttaccttgcttgccttttccctccttcgaccccgcgataaacgagtctacgcacccaaaatcaaataccatcaagcggtggatcaacaaaaacgagcctcccggttgcatcagcacggctcaaatcatgtgcgggaccatagcacagggatgatgaatgagggtgggtacgaggccaagggagatgggcaatacgggtacgagagggatagggaagatcagaatgcggcgatcgaggacccgtttgcggacgcggcgcctcctcctgcgatcagcaacggattcttcagctggttcagcccggtgctgcatgtgcatgaagaagccatgttggaacaaattggtgagccgatccttggaaccgactagaccgagttgatgctgacttgtttataactatgatctttaggtctcgatggagtcacgttcctgcgggtattgaggctcctgaggatttgtttctctgccgtctcggtaatcgccgtgggagcactcctgtaagtcgagtcaacatcgtggcatccattcgttaggctaattcgactatgcgacagtccgatctacgttgtctggaaccagaaaaaggcaaacaattacaactttttctccatgatgacggtccagaacctttcgggcaacatcatgtgggctcccgtcgccgccacgtacatcatgacctttatcgtgtgttactttgtttggtatcattggaagaagatggtcctcctacgacagagttggttcaggagccgaggttacagaaggaagatctacagcaggaccttgatggtcacgcttgtcccgaaagactaccgaaccgatgaggggttggtgcacctaatgggcaaactcaaggtcgacggaatcaagatcggtcaacagatcgattgcacctcgatcgggaggaagctcgaggattttccggatctcgtcgaggagcacaacaacaccgttcgctcgctagaagaggtcctcgttaaatacttgaaaaatggagagatcggaagcaagcgcccgaccgccaaaatcggagcgacgcttggccttggcgggaccaaggtcgacgctatcgactatcacgcgaaaaaggtcaaggaactccgggacaagattgaagctaaacgagccgatatcgacgccttgatcaggaaagataggcgggcgaggaaacagaagcagtccgtcaagccacacggagaaaactacggattcgtcacgttcaaaacgatcgccgaggcacataggatcgctcgagctcatagaggtagactcaaggagcttggaggtgccgagctatctttggctccgccttcgagagatctagtcagtcgtgcagtccgctcgttatgagacagacgatttgtgctgatgtatgagagcctcgcagatctggaagaacgtcaccatggaacctagcgagcggagctcaaagatttttatgggtttcatcttccttggtatcgtgtgctttttcaacactgtgcctctcctggctgtctctattctcgcaaacttgactgccgtgagttttgcgttcacgatcaccatgttaataagctaacgtatgctccggaaactaaactctagcttgctgtgtacgtgcccttcctgaacacgtggaagggtgctggtcaatggggagagtggtgagtcgagcgaagtttactgttcagtcgtcgctgcggactaacgactcgcgcgacaggaccttctcgatcgtctcgggagtcttgccacctaccatctcggcgcttttcggtttcctcttgccgatcatcatgaggcgactgaccaaataccaaggtgccatcacgcgatcacgattggaccgagccgtcatggcccggtactttgctttcttgatcatttccaactttttgaccttttcactctttggtgccgcttggagtgagtctgccagtctatatccatgcaaaagcctgcaaatcctgatggggcctttttgcagacgcggttgcccaaatcattgaacaagcgggcgagaagaaatcgttcaaggagatcatggacaacctggacggtctacccaacagtatgtttcccaaatcgatgtctttcgccgtatcatgtattgacgcaaggccggtttgccctttccaggcatccagcaggcgtacatccagctctcggtctattggcttaccgcattccctctgcgtggattcctggtcatatttgaaattgctcagctgatcaagctgttgctgctctcggtacaacggctgtaagttgtacatgcatcccttcttattgcgcaagtgaaagctgatgaacggtctgggatagtctctttgctaaaactccgcgagacatcaaggagtacacaaaggtacggttgtttaggtcttcggagccattgcaatcgtgcttacggttctataccatagccgccctactttgaaacttccgtcgtcttgacaaacctgttgttctcggctgcggtcgctttggtcgtgagtctgccttcgaagggtcccaggcgatcagatcgctaatccagacacaccaaaccattctagtacgcaccgcttgctcccttggtctgcttgggattcaccttggttttctggctatcgtcgttcgtatacaaataccaggtgagtccactagcagattgggtgatacttcctcatgattgacagagcatcgtatccatagcttctctacgtctacgtttgccgggccgaatctggaggccgacttttcaacgtcgctgccaatcgtatcttggcctgctgcgttttcatgacgttgcttatggttctcagtcagtcccatccggttggccgcctcggacatcatcgctaattgttcgagatgctttacagccatcgccttgaatcgacgcgtatattcggatattgccggagctgctccacccatccttattgtccttgttttcaagttcttcgttgctcgacctttggagaagcaattcaagtactacaacccttcgcctcaagaagctgaagaggagtggcgagctgccagtagcgaaaagcgaacgcatcatcgtgacatggaaaagcgattcttgcacccagctctgcagaacaacgagctgtttaccgtcatggtacacaagaagcaagaagcggttgcccgggatgtgatgtctgcttatccctggttcaacccgaaagtcatcgctgaggtgagcaatgtagacgacgaactgcccacataatcgtctgacccgggtcttttcttccaggatcgtcttgaattcgacccgaaccgcgatcgggccaacgatgcggattgggagaccgcttctgtcgcatcctcgcgaatgctcgatggacgatcagagatcggcgccaaatcagacctcgccagtacccttggacaagacaggctacaggcctactatcaacagggtcacatggttcgatcgggctcggagattggtatgaccgaccggggatccgatctcggctatagcaatcctttggaacgatcgtcagacaatcttctctatgcggccgactacactagtcagcagggcccgatcaggaaacctagcgttcgggaatacaatccccgcagaatgactgatgatccgatctcggtgcaaccgttgctggaaaacgactccgaggtcaacttgcatcagccgatcagtcgacaaccatcaacaaactcctttgcgccaccctatccaccatctaggatgcatagccctcctgcaggatactcacttccagcgatgccgggaatgagcaggaatcagagctatgcatcgagcgatgggaacaggcaggacgatcgggcctggaaccacggtcagaggttcaattgaggagataagatgaaagaacgataattgcatatttgtatctctctcaaactgcataggcagagatatcatgcacatcatgagtgcgaacagccaaatttataaggtccttgatcgactgtcagaatagacaatggtgggccccgagtcgatgacgaatgccgcggatgtcccaagctgcggccggaggcatgaccgttccgatccgaagcatctcttgaaatctatccagatagccgtaaaaatgttcgctgcaagtgttcgttgatgaattgatgacactccttgcgaacttactataaaacggtctgctttgcttcggacgacttgatcattatcgatataattttttacctttcggcacaaaccgaaattcacaggatctgacgttgtctccacacgtcaggatgattcgggccggctcgcaagcattgcatctccataggcttggggtcttccggaaccgtttgcaattacaagcaagaggtcttgtatctgcgatcaaggaagagggcaaggagacacttgttgtactcggcgcaggatgggctgggtaccagttcatgcaaaagctcgacaaggtgattacagcatggcggaatgttctacgtaatcgcacgctgacagtttcgatatcttatagagcaaatacaaggtggtctcgatcagtggcagcactactttcgtgacaactcctctccttcccagtgctgcgaccggcgctctttcgttcagggatatcgtcgaaccattacgctcagaagcgaacgtcaactattatcatgcgtgggcggaagacatcgatttcaagaataaggtcgtcaccgccgtccgggcagcaaagccaatctttcgaggaaaggacccgcttgtgaaatatcaacagagagatgcccgggcagagacagagggtgatgcagtacgggaataccgtgtcaagtatgacaagctggtcattgcgaccggttgctacaaccagacgtttggtactcctggagtcaaggagaatgcatagtgggtgtcagcagatgacgtggattttggatgcaatactaagacagtattcgcacttcatagctttctaaaggacatcgaaagcgctgccgccattcgatggcgcatctatgaattaatggacagcgctacatggccagagtatgtgcagcccgctctcacatgtgcagagcgtttcccgctgacgtgtgatcgcatgatagtatctcagatactctacgacaagctatgttgacttgggtcatcgtcggaggagggccgacgggttccgagctcgcagcagaacttcacgatttagctcgatcgaaggagttcaaccggctttacccgaccttggccccgcaggtcaagatcaagattctcgatgctgctcctgccattttgacgaattttgacaaggctttaagtaaatatgcggcgaagaagctgaaacgggatgtgagtacctcatctgtcatcttcgaagaccctatgagctgacagccagggcgtgatccaccccacagggaatcgaggtgttgacctcgcgtaaagtcttacgggtgcaaggggataagatcgtcaccgagcaagatggcgatagtacgtcctatgaagaaaggatgtccaagtgacgagaagactgaaacaggtggctttttgatagtcccgactggcttggttgtgtggtcgactggaaacaaagcttcgcctctcaacgagactctgacagctttgcagagggacaagaaggattcgtttgtcgttaccgaagatctccaagtcatggaaaaatcggacgtagaagggcaacgaggagagctcatccctgatgtctgggctatgggcgattgcgctcagatcgaggggcatccactgccggctaccgctcaggtaagccgcgatggtacttgcgctcaacgcctatcaaggactcatatctcggctatctaggtcgcaaatcaggagggagtctttcttgcaaacctgttgtcaggcaggatttctgatcctgcaaagcggagcttcaaatacgttcaccgaggtcagtctcccattgattcgtcgctcaatcatgccgacggctgactcttgatcacgctcctctgcaggtaccatgacaaacatcggaggaggcgaaggcttggtagaagctccttttgcgaatgtacgcggtcgacttgcttacgtcgcatggagaggctactattggataagctctttgagctggaggaacaagttcaacttggcattccgctggggagtaaatgccgttctgggacgggacatctccagaatctgaggacccatgtacagtctgtttagacacatttgcttgatatataattatcattcgcgaaccctagccttgtgaaccgtgtttggtgagaacgactctctatcaacggtgtcggcattgagcctgacatcttcccatggatattgccgcgggcagtagctttgttatgtttgtcgcctcaaggacgggtccccgctgatgagtccagatcagattgatctttctcactctactccatcttcaatctgatccctcaaagtattactgaggcaagaggaccagcctcgcagcctctgaaagacgagtgactgtgatagtcagagtcaagatgagctcgccctcggacatttttcccgctccatcagtcgccccgccgacgaccgctgggtatatcaagattgagcctattgatgatgctacgcagactctatccccgctttccctttccagcgcaaccccttcacgacccacttctatctttgatgacgacttgaattctatcttccataacgacgaaatctccactctgattattgacgcgatactggaggacgacgcggctcgacaccatcgatcttttgtctgtccaaatccctccaaacactaccctctcttccgactcaggccgcactcagacagcatcgccaagctatgtctggtcagtaagcatatgagacacttggtcctgagtagactctacaaaaccttgaagtttcacggaggaggggcaggtgcccaagacgagtgggacctgttcaatagtcatatgatggttaaggatacctcgagagtacatctgtctcaacccaaaatctacattcagtgagtgtgacaggatacgagatgcctcaggtccccgttgctaatgcgatcccttcctctcgtcatcagggaaatcatctgcacgagaccctcgcaaaacaaagagtacgcggaaaacctctttcatctgatgcacgcctgtcccaatctcaaacgcattgacccatctcccatctccacccatcatttcttcaccgaaaaacgactcactttgcccgtgcctcctaacgtcaccgagctccgttgcgtcgccgttcaaaccaagagccacatctggggcgtggcaggaaagacgcaggacatgttttcggatgtgggccgcctccccagagatgcattgaaaaaggtcttttggaagcgagacgactttcagtatgtgaccaagcttcacatccagccgaccttcttggaatggaggaaagtcaacctcgaggaagtgccggtcaagctggaagggaagtctacgtcgatgcccgaagaggagaagtggcgggtgaagttgcagagagtcgggaccgagaactggggcaaccttggagctcttcaagacgtctctatcgattgccgcgaagtcaaactgtggccacattcggccgaggaccttgagaaatgggctgttaaaagatatcacatcaggcccgccgggattcaccccgctgatcctccagtggtcattccaccgtccatagaaaacatgtggaaggagaatcgaatgacgaacctatggttctggactatgctgggaaacactactcctctcaaagagcttcatcagtttgaaatcgacttggagtacaacccatggaagcctaacggaatctacgatgaatgggtaagtcgattatacgagagtgccctttcagcaaccgattggtgctgacgttgtcttgggtcgtgatcgtctggtcacagtattggttggacaagtggattacgcgacttgacgtggtcgcccgcaatctcgtcgttcgactccacgtccactcgccaatccactacttctccgaaatgcgccgccatttggctctcccagacgaccgctcggccgaaaatttcaagcctggatggctgctgaacaacctgcctgaagagcagagaatgcgcgaggtctttggaggcagcctgaaccgagatgcaaagcgccaagggacgtcgggctggaaatacctcgaagttcagctcgtggcggagaaattccctcgatctcagaaggagattgtcatcttgaggcgatggcatgtcagtatggacgagcatacgaaatcgcttgtccacatcggcggaggatcgaccgaaaagatttacgatacccagtttctcgagtttgccgacaagttcaacacactcgactacatgcagcggctcgagactcgccttcatgggattcccaaagccctcgtcgggatgatctagaccttttcgggcagccctagagcagcagaaatcagaacgaatcaccacctcgaatctgcgatcgacagccaacgaggttgacgcgccttttggtgcagatatcatacgaagacgacaatacaccgagcaagatcgcttggacgaactcagcgctagcatacacttggtatagctggccaagtagcagatatggatacacgatatttttctccatcaagagataagacgagaatcagctggcgcggacgtaccggcaatcgtcatttcgtctcttttaagattaccgaccgaacccacgacgtgcccaaaccgctatgtcctcagaatttccggcttttcctcggaaaggtattgatgccagtttctctcgtgtttgtaatcgtagtcaatagacatgattatgaatttcctgcccccgatctgcgaccttgacgcatgacgagacgtgatggatcgggcattatactgcccgagatcggcatgacgtaagggactcctgatcatttcgttctcgcttaggttaagtttaggcaacggggactacccttctctggaagattgtcagtgtggatctccgatcgcggaagcggtcataggagtcgggtcgaacagcgcctgggctacggctgctcctcgcgtctcgcaatgtcttacgacaagcggcggaaaatacacaagcggtcagaaagatgaaacacgtatcttgatcacgccgggagctaattcaaaggttcctttggaacaatagtcctcccgcttcggggttcaggtgagaaatgaacctggttagacagaacgtttttgttgaaaatgaaaagtatatagcacaggggacccgccgagcgagcgtgaattggacattgttatcacccaccaacctcatatctcgacccaccgtcaacatgagcatccttgctggtgccactcagtcctctcaaggggactcctccttgatcgccgggatccacaacgaggatttgagcttcgcgtttgccagccaagaagaaatcgagtcggaaattcaagacagcactcttggtctcactttaaagcgtgaccgagatgaggcatttggcggagaggatggtacggacgtgaagaagaaattcagtgagccagtcggccgactctgtaacgatggccgggattgacgaaaagttcgtaatcgcagagcgcaccggcacgtggtgtcgtatcgatagcatcgaagagactgaagatctggtcggcataaaccagctggattacaagtacgagtatgacccaaagctcaggccatacacagcgatagtgtacaagaaccagtacacgatctcgatggacaccggccgcgagtccaatcgagtctttcgaactgtgccagcaaatcgatttctcatcttgactctacctcctattaacaacatgcgagaggtcttgaacatattgaaccgggatatcacccatacggtacccgatacaggtgagtgaatctcgatcgtgaccgagatccacttgatcgctgataatgtcctgctcggagtctcaggcgagatcaaacggttcacttttctatcttcgagcgacagccgtattcgaactagggatcgcaaaacagtccttttcttcgaagaaggtccagatcatacagcgaggagtttgctgcaaaatttcggggatttggacgcggtgctgctcaagagcggcatcggaaagtactttgcgcgacttagtctcaacttttctacggccgttccgacgatcaacattcctcgatctcaagtggccacaattcccgacctgcaagctccggacggcaaggagtttacggacggatgcggttgcattaccacatcggctgcgcgtcgagttgccaaagccctcggattgaaatacataccctcagtcttccagttccgctatgccggcgcaaagggggtgttggttccacaagaagcggcggatctcgagaaatggtttccccgccattacgagccgggcatagtgctttatcttcggccgtcccagatcaagtacgaagcttgggaatacacatctttggacatcagtgattactcaaggcaacgcacggtcttcaaatgcgcgaagctacagagggccatgatcagacttctgaccgaccatggagttccgcttcgaaacttcaaggtcttgttgcgcaaagagctcgaacacttgactggtgtactcaaagatcgacagaaagccagcgattggttgaaacgccaagaaacttcgcttgacgctggcgagcggtcgccgcaggcgctatgtaagtactactcgcctcgtgtcaaattgcttgtcggtgaacctggtctgacttcgaacgatcactgcataggcttgagaatgattgcggccggacacgatcttgccgagccttaccttgcacagatgcttggtaggatgctttccaaggacatcctaacccttcgccgcaaactgcatatcccggtcgcaaacagtctttacctctttggagtatgtgacgagtccggaactttgtcggaagatcaaatttactgtcatgcaggcaccgatgggttcatcgaagggaaggtactcgttacacgttcgccaatgtgaggaccctgttgtctagtttcagatgatcctggttgacgcaagttgtacttgaaggatgcatccgggagatatccgcttggtcactgccatcaaacccgcagaggataatccctactatcgacaatcggattgcgtagtcctccctgtcggcgggtaccagcctctggccgacaaaatgggcggtggtgagttttgcttttgccgtcatgatctcatctccattaataatcgggatgaccctgttattaggcgatctcgatggcgaccaatactttatatcctggaacgaagccattatcccagagacggtcgattcggcgaacccgcgcgaggtctctcggcctggcacccctctcgagggcaagatcaaatacgatccgcaagtcgacaagaagattaaagatcacatgggtaatctgaagcgatatgtctcgaagcgtgttcttagctttgatatcggtgccactgccaagacttgggaggaggcagccaacgctttacaactaggttcccgtgacccatattgcttggctctcagcgccagatatgagtgttgtctcgacaccaacaagacgggcgaggagatcccgcctataccatccaatactctcaaaggatttctacgtaccggtaggtgtcatgacctttgcaaatctatgcaaatcccgagtagcttactttcgctgatctgggcgaccaggtccgtgccctttcgagcaattggacctgatcatccgtcaagagacactcggcttgtccaacccgtggacgtacggcaagggggaccgcacgtccgaggaacagcacctccgtttccaacgcgatcccgatttgatgtttgagcagcatgttccggcttggaggaaagcctatgccgacgtttgtcgtcttttatcagaatattggacagagtttcacaagaatctgcacgaaatggaaggtccaaacaggcccttggttcgacttgaaaaggagcctgaaccggtaggaaggaacgagcctagtatgcttagtcaatcctactcaagtcagtttcgagtgctgattacgggtcccgatcagctaccaccgccaaagatttggcccgcgaggcattccaagacaagatggagcaattcatggactcgcagcggtggactctctttaatcccgctcataagggagctgagcacaaccacgagaacacgatcatagcgtcagcctgttactcagcggtctatgacagaatgtcgaatggactttccactccgatcgagatgggctggtggggcgaaccctggctgaacaacctcaaagcgcgtgagtccttaccgcatttcgtatgaatcataaagaagctcaagagcccggctctagaacgtatcaacgaaagtctcgggtcgttcgggcctccagtctgtgtggcaaggtcctctaacaaaagggacttccagatggaactcagcgtcagggaaatgcgacgagtcccgatctctacaggaggcagaacagaaagcgctacatacgtcactagcagcgcgccgagctgagacccgatctatccattcggtttatgtgccgcgtgggtgtgaaggtacataacgtcagtcgccctcctttgtctatccctccctatgcgtaccctttgtatactggtaggcgagccttctgtaccccataaataccggtcaaacccaagaccagattttgcatacgtgtcatcacattgtcaaggtcaacgatgagctcctctatcgatcttttgtttctgggtacaggctcatctgccggagtgcccgaagtgcgatgcttgactcgacccgacgattctccccttggaccgtgcgacgtctgcctgcgaacacggtcggagcagaaatccaagaatgtcagaggttccacgtccggcgtgatcgttaagaaatgggataccggaggtcataggtaagatcagatgcctcggcgctctgcagacttcgactgaattgcgttgggatttgtagcgcaattctggttgactgcggcaagacgtttctcactcgcgccgtcgaatacttccctgcaaacgggatcagacggatcgatggtgagttaaaggcgaggtatctagccagagaaagtcgcacaaccttatcggcgtaacccagctgtattcctgagccatatacatgcggatgccattcaagggttggacgatcttcgcctcttcaccttgaggagcgagattcagtcctcggtcgatgtgtacgcggacagagcgacgtacgaaggtatcgcccgcagatacccgtgagttcaatcaggtatcgccttttccgcctgcaactgaggctagtttcgaccctgcagagcccttctgaactctggcgtcagtcgggttggcgcgactcccgtggccgcattacagtttcacatctttgaatacgggcaaacgctcgacatcgccgggatagtgagtatcgccgaattctcatctgcgcttaacgaacgtcgccgaccggcaggtctctttccagtctgtcaaaccggtcgcggcaccgcacgggcacgtccacatctcggaatacctggcttcgacaggcctccaatgcgacgatcctgctgtcgctttggaccgagtcttaccggcactctactgcgcagcctttgagtttgacgaaaagatactctggctgagcgacgtctcgtccttccccgatgccatgatgaaacagctcaaagcggaccggcctctcggtagcgatgacgtgtacgacattgtcgcgctcgacctgaccaatatggactctaacgtcagtcacatcgggatcgttgggttcttccaagctgtcttgcggttccgggccaagcagacgcggtccgtccagatgggccatgattacgacgcgtatgggttggataacctgggcgagatgatcagcggtggtgagagggacccggcgcaccatgtgtggtttgaacaagcatggaagcgcatcagcaaggtgcatcacctgtgggacgatttgcagaacgcgcagccgtacgttcgagccgggtatgacggattgcgcttgagcatctcaaaggggcagatcaaagaagtcaccgcggactagtctgggaatcgcgagccaagccgaccgatttgtacgatatctagtcgtgaccatgacagcagatacaaccccttcacttggacttgttggcggcctttctctgcacttcttccttgaccatgccgcccatgctccacgcaagcgttccgagcgcgagcgcaccgatcgtgtacgtcgtcgttggccctcgagtccagtacgtagcggtcgccagaagcggtccgatcgctcgacccagttggccctaggaacgacacggccgtatgagctcgcctcgaacggtagctgtattctggaatagatgccgtcgcactcacagctgacctaaaccgtccgagcgctttcccacgtgcaagttttcctcgatgatccgcttcgtcctcgacgtcgtcgcaacaggccgccgcggcacccatcatccccgtgaccgccgtcgcgctggtataactcaacccggtggcgatggcatagagaacccaggaactccatctcgagtccttcacccctgccaatgggaggatggccatgagcgcgagggctacggtacatgaatatatcccttgctgggtgaatgtgagttccgaggtcttgtgcttggacagtctcggtcggacaaagcctccttgcaagagggacgagagcacgccgatgtctgtgtgtcgctatcaaggtcagcaaccggtacgtgatgaagtttggggcgacggcacgtacaggagagcaacatcccgttctgcttgttggtagcgaaaaacaggtcgtacgctgaggtcgtcgttccgatcaaccctggggaatttgactgtcttggccacgacccggtccgcaagactcacttaaaaaggtcaacgtgaactcggcctgttcaccatgtcatgtccccgtcgtcagctcgcccatccttgaccctcgcgcgcgcctcgtcgtgaacgagccaaacactcacccctgaaaagaagagcaagaacaacccgtgcaacctgccgagctttctcaacctctccttcctgacctctacgctctcccgcttgatccccgattcgcgggtatcctctgcgtcgacctcgaccttgagctcttgggccttctgatcagctccggtcggcgagggacgggacttgtaacccctcgtctccgggaggttaaagtacaggtagatcgtctcgacgcagaggagtacgagggagacgagcgcgggaaaggcgtacacgttcaagatcggtttcgagtcgatccccgggatggccctttcgggttggacggtattcggtagggaacgggaagcgaagtaagctccgatggaagggctacccggggagttgtcgacgttgtcgtgaaaggaccgagcgccagtttagcccaccggctcctttcgtctcatttcgtcggcggtgtgacaaccggacggtcctactcacccaaaagtgaaacagacggaaaaggcgatcccgacgagtgccaacgatttagacctcgtctccggggtggtcacgtccgagatgatcgctctggtcataaccaacaccattcgccgagagatcaacatcggggcgagcctcctcgatcgaaatagagcgaggttttggactcctatgtggacttactgcgagagctggacgtttccctcggaaagccccccgacgagcctcgagatcaagtacgtcgactgcgcccgtccatccacgacaaagcgccgaatgggaaacccgaaagaagaagaaaaaaaggaaaaggaaaagaaaagacacgatcagagtcacggttccgataccagccccgtcatctcagccgaagatgttcttccaccaccagcgaacgagcaggacgctcgcccggctctctcaagggactcacaaacgtcgtactcctcaaccagatgaacgcggagatgatgttgccgagcatggtcaatagcaagatgggtttcctgccgtacctgtccgacactgcggtcggaacgggcgcggtaccatgcggagaggtgccgaggtgtgtggggagaggacgagatcagcttgaagtcgacgtcaacgtcgaagttgaattctaatccacgctgcacccgacttacgtgcaccgagggaaggactgatgatacattgacaaagggaaaagacgctccctagggctcctccgaggaggacgacatcccacctcttgttattcccatctttcccctgtccacccgaatgagaatgagaatgagaagaagaaggagagttcccagcggcaaaagcgcgacaagatcggaagaacccgagtaagagggataagctggagttggggttggatgattcttgagaggtgtaatagtcgatcaggcgggggaagaggggtaatgggagggtaaaggctggggtggtctcgacgtcgtcggacggatggtcatttacggggagacatgtttgtcagttacggagtaatggggtgtcttgactcctggccaggaagagcaaaggagaggctctcaccgaggaggtcgaggacgagggcaaagaagacggtcttgacgatcctggacgaccggtcggacatggtcttggatgacggcgaggacggcatgctcgcggtcgatcggtcgattcgaaggcgtgtgtgtctgtgagttgtggcgatgatgacctaggacggtggtgtgaattggctgaagcgacagtcgactcttagacgaccatggctatacacagctggaggttggttggtttgggtgtttgaatctgttcgggtctatgaatgatcaggctcagcagcaacttacccgggggatggtgaatggttgaacggaagctatttctagatgacgaattgattccgtcacagctctctgccgagaagattgcggaggctattacgtcactgggtcactagcgcccagacatccgggtgattacgttatccacaaacgcgtgagaaagtttggaaatcacaccagaacgaccaaccagcaatcaggtcagatccctcccaacaacccacccaccccatcctcgtcgattgaaaaaaaagggagaacaacttatcacttctacgatacgcctgcatctcgtcgacctcacccgcaactcacgactggacggacagggacaaatcaacggtctatacttgccgctaattccccacgaatgtgagtcctgcccaccattctgcaacaagtcccacctcgaatccccccgagatcccacccccattccctgacacgatcatgcccgagcacacccgagtatgatgatccaacctcagaaaaatatcacacctaaaaccacccatatcctctaccccgaggacccttcctccctcccggggcttgcaggcgagaaccgggaggtcagaggaaagagggggtctctttcgtcctcggatcagaggtcggaagtcgaggagatccattaccataaaaaactaccacatgatctgatcccccccgacccaatcgcccgcctgcgtgttccgtaggatctcatcgagttgaagatcaggcaagcagaagaattccgggctgatcacggattggatttcggaatccagattttttttttcgtacatcaggtctagaggaaccagactggacgatagtcgaaagggaaacaagaagatctcatctgatctgatttgacctgataatccggccttgtaagtcccgcaccttctcccaattctattctactttcccggaccaccaccaccaccaccaccatcaccaccatcacctcgactacaccacgacctaatcccaaaaaaacaccaaaaaaacaccctcgactgagcggcaacatccacgctgattcacgctcaacgatgtcgtgcagccaccgggttggtgggaaagagaaaagagggattgccatgacgatgatatatttacctcattccgacgggatccacgattgggtcccttgatgagcggatttaaacgatggcggagcgattccagcttgttcccactttgatggcgacgacgatggtggtggtgggggtgtttagtggggatggtggtggtcagatggtggagcctggggaatcaagcgggagcgagggctgatgatcgggattcgtcttggtatcgtctagctcatcacaaacaaatccacctagccgtccccggaaaaacagaccgtgagtttcttttcccaattcctcacctacggggcacgaaccggctttgtttcccccttccccaccacgacctactcttattttgcgatcgatcgtgatgaacacaccgatgggcggacctatttctacccaatcctcaccccatcccaaacgtcccggtccaggcaccccgccaaagtacaaaatttataggggatcgtcggggctgggtacgggggtgtagagatgggcatgaacagtccgacggggatgggagggatggggttcggggtttccgatgtgcacggactgggtgcgacctcgacagggctatcagcggcggcggaggatccgatagggttcatggcggcctcatcaccgtcgccaccttccgcgacattgcaacaacaacagccttcaggggtcgagagcatgacgatgcccctagcatcgacgtcaaagaccgactccctgatggatggacacagccccgccgatgatgcccaccgttcttccggtgccaacagcgctcaatcgggcggaacaccgacaaacgtcaataacatcgacatcagctcgatgccgacgcacgcacagatgcagagcttgttcggcgcttccggattcaagatggacaagcaagcgtatgcggccgccttgtcccaacaccaggcgcaacaacaacaaagccgaggcagttcgggcgaacaggacgaggatgagggcgtttctgcgcccggtgtcaacgggaccgtcccgcaagagaggaacaagcgaggcaaatcgtcagatgaaggcaacgccgacgacgaggacaatgtcgaattcgtctcttcctcacgcaccgtctcacgcggcgacgccgatgacgagcggaccccaaagacgacgaggacgaggtccgtctcgaacaagcgcaggaaacgcgatcaggacggtcagagggacgaaccgcccgtacctcccttgccgctcgagtatacgaacggggtcgtcaagatggagcacgctttgcccgcctcgtcaagcggcttggacgtgccttccaccccgaggatgaacggatcgagagcccttggcgcacctaatacgcccggccggaatctgaaccaggtcaatggcatctcgagccccgaggtcgggagcaaagcagcagtccagaggagtctgggaatcggtggtggatctggaccttctggacccaagacgccgagaaaagcgaccctgatgtctgggcggaaacgcgtacgagatggtgagtgcttaagaaagcccgagtcgactggttacgacatggcggctaacgtattgtggttgcagacgaagacccctcggcttccaacccttcggcttccgacgacgagacgcctcaacgcgaagttctgaccgagcacgattcgacaacgatggaacccccacgcaagcgagggatgattttcaagaacgcgtttggcgcgagcgacgtcgaagaggatggcgacgaggacgacgagggcgatgacgagcccggttctcgatcggtcagcaagggcaagaagaaggtacccagcaatggagtcggtatcaacccgaccgatggtcagccaggcggattcgaactcgttgacaaggatggggattcgatgaggcgaaagatcaggatcgagtatatcaccgataagagcaggcgccatattacttttagcaagcgaaaggccgggatcatgaaaaaggtcagttctcgatgggaggatcgctcgcgagaggtctgtttcggatcgctgatcgacgcttcattcgaactgcaggcatatgaattgtcgacgcttaccggaacccaggtcctcctcttagttgtcagcgagaccgggttggtatatactttcacaacggccaagttgcagccgctagtcactaaatcggagggcaagaacttgattcaggcgagtcgtccctgagaacgtgcttcagctcgcagcccgctgattccgagtacattgcgattgcaggcctgtcttaacgccccaggtgcagatgatgatgagcatggcggaccctccgcctcgacgtcaagcgcgacctcgaaaaaggaacgcccgctggccattcgcccgctcaagttgaacgcggaagagacaggcaaactggctgcatctgcggcctcggctatccctgtgccgcccatccctgaagacactacgcctcggccacggaaacgcttgcctagcggcaaaaatcgtcggccaagcaagaaggagcagcaagcgctcaaggatacccagaccgatggtgctggcaatcctctgagcgagggcaatcatccgacgagcgagagcgatagccagaccgtcgacattccggatcacttgcatatggcgcaccatttgtcatctgcagcgagtgctcatgacatgcagtcggtacagcagcagcattcgcatcagcagcaaatgcctccgcagcccttgcaacatcagcctcagcaatctcaacagcctccccagcataacggtcagcacatgcacatgcagactacacccgtctcggcgaccttttcaacgccaacgatgcatcccaacctcgggtcacaaacctatcacatgtcgcccagccgagcgcagatcaatcaccaggggggatattatcatcagcatcacggccagccgacgatgatgaatatgcagcctaacttttcgtatccgactccccctacccatgctcctccgcaatatctctcgggcgtacatcacgggatgggcggatcacagggcttcgatccgaaccactttgccgattcaaatccgtttgtcgcccatcaaaacggaatggccatgtgaatggacccatcgcatcaaatcttgcggtcacgacttccggtcctttcccacaccactttttaggataccgactacttcaacgacacgttacattaatcccacgatttcgctcgaccacttcttcattcttcgctagttgtagatattgcccttgatggcaacggcgctcgagttcaacaggaactgtagtctagccattttgtcttccagattttcccttttgtgtagattgcgattacattatcgtctccagagtcatacgccatgcattattgtaatcctgtttgaactatggcgtgaccaggtaaagtagtcgcggaagcagaatgaccgtcaacgacatttcggcgcctgctgcgaacgttcacgttcgatttcgccattttgaattcaatcggtcttgacctgcatcattccggtgctcgactttgtctcctatagtcctccctcctccaccattacatctgcagtcggtacaacaacgaaaaaatgtccgaacaacccattcttgttggtgtcattggagggtccgggctgtataagctcgacaacctgaactttatgtgagtggacacgagctacccaccgaataccggccgaaacttatactattgctgcacagcgacactgtcaacccggaaactccttggggtttcccttcgtcccctatccagatcgccgagttgccgtccggtatcaggatcgctttcctcgcacgacacggagagttccaccagcatgccccgtccgaggtccctgctcaggccaacattgctgcgctgaagcacatcggtgtccaggccatcgttgcgttttccgctgtcggctctctcaaggaggaaattgcccctggcgactttgtcattccttccgggtatgctcatgttctatcccacgcgcattcgaagtcgagtcttaccatatgcatgcggtgtcaatcagaatcatcgacaggaccaagggtatccgcccgtcgtcttactttgaaaaggtcggcatcgttgcccacgccatgtttggtgacgctttcgacaacaacttgtccgagttcttggcccccaaggtaggtgatagggccggtcatcacatccatcttgcaggataaccgagttgcgtccctacaggtcaggcaagtcttggaggctcacccggagggtagcgtcaaactccacgagaagaagaccgtcgttgtcatggaagggcctgccttttcgacccgagccgagagcgtgatgtacaggcagatcggcgtgagttcactgttgcagcggccggacaaaaacaatggcttacgagaggtttgacagggagacattattaacatgtctactattcccgaagccaagctcgcaagggaggctgagttgaggtgagtctcctcttttttgatcgggagcgaatcgatctgattcttgaatcccatttgtagctacgccttgatctgtacctcgaccgactacgatgcctggagggtatctgaagagccggtgaccgttgcgtgagcactcgatctgacagcgattcactagtcttagcacgcatctaacgcatcgcgatgtctccatcagcgaggtcgtaaagactctcactaagaacgccaacatttccaaattgatcaccgtcgagtgtttggatgccgttcaccacgctgttgccgaaggtaaaatcacctctgctgccaagggaggtatgaagtactcgatcattaccaaggtaggagcaggagtggtcgcatcagatgggagaattgtgaggcttacgagggtattttttcttggcagcccgaggcctggcctcaggagagcaagaagaagctcagctacattttgcccgactacttcgagtagagctgctatgtcatagatgtgtgcaaccaggtccatctgtccgtgggcagaacgctgaatcttggcggttgtatagaaatcgctatagatacatgccctgcaccatgggagaatatgaaaagctgtacaaggtatcggtttcgggcggactggcgtggtcaagtcgtgaatggcatgaaagtaagttacgaagcgctggccatcgtgtctcggttgagaggcttgcagagaatctccagaatctcggtcgataccacattgctcgtacttcggacggttgccctcgctaatgaggcttctcgattgggctcgaacctgatcaggatcccgctgtggaacgcattgcgaggtcaacacgaattcggttcaggaagttcgagtctctctgcttacatctttccttcagcagtgtgcagcacgccagcggcgacgtgctgccagatgatccagcagtcagcaaacaatctgcagtgaggtaccgttcgggccggttgctcacgttgttctggttgggatctactttgtccagaagggcgaacttctgaccgccaatgaccttgccatgacgggccgtatctactgaaccatctcctgataggtggatggggaagattttctgtgtctcacgtggcgggcctggcaattgatcccgtctcagcactactatctctgtcacggtaaacgcaatcgcgtgctcttacctccgatagctttccaccgaccgaagaatgcagcactgtctaattgcacgggttctacgaatttggacaggaatactggcagcttgaggacgaggtttcgcacggtcccggcgataaaggacattttcaggattggcaaggtcgagaacgcagacttgcattcgatttgcaacaggtattgaacttgagccagtccagcgatctcggtcgcgggcggtttatgaaaatcgacttggagggcttggggctccgccgtctcgattgtggcagaaaacgaggtgaatggttgaggaatcttgttcccgatgtagatcgctagtcgtcctaaatttccgtgatattccgccttgactccgatctggagctgttcatcctcgtaaagcacgccctccgagttgtagatcagtctttcaagccactacagcattagatgaccacttggtcagccacgagtcgtctaggaagagtccgtcgtccaacacttaccttttcgatcccaggccccttggtgagggacatcgcagccagtgccgcagctgtagagatatgcgttggcgtcggggctgtttcgggcaccgacgtcgcgaccggcgcatgtgcaggctgggccacggccgggagcaaaggtgtttcctggacggcgggaccccccatgtcgagtccggccaacgaggacatcacgtcatcggtgacggcagaaggttcggcgcccatcatgtcgtatacaccaacttgatcacgtcccacctcgctggggctctgcacatcggctactgcaggagttcctgcatctccactcgattccagcttgtcggatggctgcacattagagaaagatcggaatcgggcagcttgtctgcccttgttctcgtcttttccgccgatgacccaagtccgtttgtcctgggtggaatcagccttactgtgcagtcggctcacaagggccgattctcgttcagggaagggaggcatctcctcgcaaaccacctggagcagctcgtcttcgtcattccgcgaagtcaaggccaagtactcgcacgcgcgctgctgcaattcggcgtcgaggacgtaacgatatcgctcaaagatgttgaccaattgaggcttgatctccgggaataggttcacccactgcgacgtgcgccgagccgattagcaattgctgggaccagcaggaacggagttgcactcgccttgatgtaggttgtcaacaacaaagctctcgtggtcgcagagcactgatttatcttggagtgaagcgcttggaattgctcgatcgggctgcaaccctcatcgttggcaatgagatggccaaattctcccaaaatatacccagccaccttgatcaacgtttcatgaacagtagaggctttcagatgctcgaagactgcgcgtgaagcatatgcttgaagattttcgttgttcgtcacgagctgaaccactcggtaccagacttctgggccgacgtggtctccggctgtagatatcaacgagaggattgtgtcgacataccactcgtactgttatcggcgatctgatcagtagcgagtcaaagatcaggatcgagaagatagggcctacctcagtggcgaaccgttcggtcagaatggcaatctttaaaaccatctcttctcgcagattataatccgcaacttgcaggtacctcaataattccccgacgatgactttcgagttcgacgtgtcgcacatcgagtagagcagatcgaggcctcgtctccgcacgctgatatcgcgatctttcaaggaggcgatgatgatatcctggtgcttcttgaccggcgagagcgactctgacacagctgccaagtgagccatggcatcgagaccgaggtaccggacgttggtctctttggcaagaatgaagcgtccaagcagcttggaagacgcagcgaccgcttgggattccgggtcgacgtgtatagccaagttgatcgcctcgaagagtactgcgttttgcgcattgttatgttgaacattctagataatgaaaatgtgggtgcctgtaaataacgattcgaagctctgtcgagtgatactttctcacctttggtgtctcttgcgagttttcgataatcgtcatgagacagttttgcaaaacgctcttgatcttcttgttttctgttattgttcaaatcagtcaacctaaggtagacctaagctaaatcgaacgacttgagaaggtcatacctggagcagggtaatattgcagtaacctcagaagcttgacttgcagccagggtattggcacctatttgagcggacaagatatgtcagcgagcgctccgattagtaacgtattcgcctattcgaactgaccttgtagtagatgtaatctgatggaaactcgcggtcaaagatcaactaaaagggcaaagtcgaggaaagccttagtaccgaattgggtgtcacgcaaacaaagccttcgtcttctcacccgggtcaaccgttcgacagccttttgatagcacattgcaaagtcgtccaggttgtcctgagccatagccgacacaaggttggtcacgcacagcgcaacaccctgattcctcgcccgggccttatatcagccgagtgtagccagtggggcagtatcttgaaggtgaaactcacaggatcacgatcgtccatcaggctgatgatcctctcggcccaatccgctacaggtaggacagtcggatgcttccgatacagtcgcaacaaggtcaaagccgcctttttgcgcacaaacgtgctcgacgtgctacccacggtgtttcacttagcgaccgacgaatcaccgacctcatcccccccgggcaaactcacgcgctgagcaacagtcgatgcacgtcctcggcaagcgattcggccatctctttccccccgatattcgcgatcgcgtgcaaggccaggcaattgttgatctcgttgttgtcatccagatctttcctgatagaattgatcaccagccggatcaggtccgagttttcgtgtagcaagagcgtgatggcgaggtagccctgggattgaatattgatcaagcttcagatgggccaactcggtaggtcgggcgagactatcagggtgaagtgtgacgtacgatctgtttctcgctgtacttgttgctcgagatcaagttgaccgcttccatatgaccagtgtccaccttgtagccaaggatgtacgtgaagatgaccttggcgaggtactttttcttctgatatccgtccagactgccatctgggagagcgaaacggcctgatcaggcggccgcgacaagggagatttcgagccagcttgccggtggacttgcctttgaacttttgtcggatgtgggccatctcccggttgacccgttggactctatgagacgatatgtctcagcaaaaccatctcaaagtctttaatcgactcggctcactctagatcgcgttgcctgcatgctctgagatcgctgatgtactgggtggggatacagggacggatgcatgagctgtcgacacttcaaggtacgcgttttcgacgagccttctcacctgggtcagccccctcatcgacgaagccatcttgatgtgattcagactactgttacagacgtgagctgtagctcaaagatgctagtgtatcgagctatacacaagcccacctctttgtcaatcccccaaggtgtggtccgtgctgcctcgtgctccttcctcctaggcctgcctcgatgatgattgcgggcgaggttgattacctaataatctcacggaagcaattcgcctatccccgttgaccgagtcgtcgggctaccggaaccaaattgcgttggggatctagacctcggctgacgaatatgtacaagattatgaatgcgagcaagaggtcatgctcgactcgatcggtttcatgttgaatcctgcaccgactcacgccattgctcccaaattggcgtctcaagagaattgtaggcacaaatggaacctccaagttcggctcctgcgcgctcccgacgagattcggtcgggtcgagctcgggacgaaagcgtcggaaacacaaggctgaaccgacctcgaccgttcgagtcgtcctttccaccctcatggtctatctgtcttaccagatcctcacaagagaggacgatgacattgccaagaccaatctacacattcctcatcttgacctcggttcgagtcagtcgagcggatggccgcgagcaggcggcaacggtcaccaaggaggaagtcatgcgagtttcccagatccatacggtctcggacaccagattgcggggatgggcagcaacctgctccaccacggcaatatccacagcgctcccgccagtcagaattctaccgacctgcagtcaccatcgctgatcatgcgggtgcttcgcggactcgccgttgggatctattcggtctttacattcatctaccgttcgctcaacagcactctcctcctcatcctttcactcgcgtactacctcgcttcacccctcacaacgattttcttcacattgacaaatatcttagtctctccagcgaacacgacttggggcgcgatcgtctgggtatgggaaccggtcggtaaatggatcggaggcttcgtcctcaccggcctgggtctcggcgccggtctcgcctggatcggccaccatgtcgagagtttcttcaaaggaaggatcggctctctcaaggagcggttgaaggatgtgtttgtcgactcttggttaggcagggttttcggaatggaaacgggcgatggggagggtgctcctccgtttgagggttcggatcagcccacgccatacgcgatgacgcccgcggcaacctcaggtttcggacgacatcaacactacagacagtcacaaccattctacacttatcctacccacctcatctctcctaacccctaccctccgcacatatacgccggacccgaacatgcgtacgctcttccccaacctgcattctacccgcaacccatcctaccatctcagtacctgcctcatggctcgaggcgcaaatcggaatcgtcccgtcgcgtctatctcacagcctccgcgagacgagcgggacgatccagatacgatgcgggggaaatgtcactttcgtcctccgagtcgagcgaatccgagttggacccggaagccatcctgttgggccgaaagacgcgtcgtcggaccggctcggacatcgctcgacaggtcgacatgatcgatcctccgacctctgcctcttcgcgatcattaggaagctcgagatccggaacagaagaagagtctcccacccgagcgagtgggagaccgggcaggaatggcgcgggagggtccttgtcaaagcgggcggcaggcaagcgggctaaagccatccatttccatttccacccgggaagtccgggagacacactgaggcccgcaacacatggacgcaagaatggagagcaaagtggcgatgaagacgacggttgcagtcacgaagatgatggggagactttggcagtcacttcaacgggaagaggggatgggcagaagactcagaactagcgagctccggaaaaaagtagattagcgtgataagcgatctctcaacctttgatgatgccaaggcgtttctctattttttttctcttcagaaccaatcaactgtatcccatacgaatcgtgtaaggtgaccgcttgtaaacagtggtatgtcagagatgtcattcttcatgatcgcgagtgcaaggaagaatatgtcttcgtgatgatacgtcaaggaaaagtcgtgatgccgggaaacgagccggcccagaaatcgtctagatacgccgatcactgttgagtgatcgaaacttctcccaacatacccgccaatctataaagtaattcgtagcttgaaggtcagcctcgaacctgacaacgttttatttcagtccaatgtagcacgcactggtcagccgggtcgacgggcttggagacggtctcgacaacctcgtcggccttttcgtcacaagattctttctcttcctctgacgcttcgtcttcatcatcctcaggttcctccatgtcatcaactgtggtgtcaagtgattagtcaaggaacgtcatcaggggcatatgcatcttcctcgtcgactgatgcttacgttcgtccaaagcgtcctcgtgtccgtggctggccaaagcgtccttgatcctctcgatgcattcatcctcgggatcggcccggttaccattgagctccagggtggtcaacttggaaagatgctcctgaatcgccttggcgaggatgtggatcgcccttgcgtccatctccccgtactgaagtctgagcgtctcgagcttcgggttggcacccttttccagagcggtggccagagatactcctcccttggggctcaagagacagtcggacaggttgagcgagcgaagctcgggccatgagggcaaagaggcagagatcgaacgggtcccggactcggtgcaggtgttgtcctgcaagtcgagggactcgagcctgggacacttgctcagaccttgggccaaagcgtggattccctccatgcggatcccgttctgagggagacggacctcgaccaggttgccgtgcgccgcgaacgctttggcaaagtaaggagcggatccgttctccaacctgttcctcccacacaccacagtcttcaaattagatcgctccccagcagcctttgacttgttggcgttctcgaggagagcctttgccacgacggttccgccccagataccgagaccgttgttgttcagcttgaagatctggaggtggcggttgttttcgagaaagggcaccatggcatctgcacatcgtccaccgaaagcattgtccgacagatccaactcgaccagagaagtatgcgattgcaaagcatcacagatggcggagagagccgttgggatctcgctgatcagacggccagtaaacacgtcggcaaagtcggcaacctaaattggtaaacttggtcaaccttgtgcccccatgcgatcgatgcgcagctatgctgtcctgaacgtaccttgagactcttcttgcttttcaacacctcagcgatagcttgacaagcttccactccgagcgagttgcctccaaagtgaacctcctcgacgtcttcaaacttttcgagctccgagatgtaaggctcgaggtcggcccgagactgagccttgatgtttttgcccaagatggaaaacgatttcgaagacatggcgacggggttcaatttcacttgctactgtgtcaggagctgtggtcttgtggattaaggtgactgattgtttagcagatggactagcttgaagagatgtaattagagttgtgttgttgagaagcttcccaagacgaatccaacaacaagaaagttcgcgcgagctggagatatggtcaaggtcgatcagaactgttgaacacctgagttaggcataactgtaccatctctggctcaacactttcactccggagatctagcaaacaagagcagggagtaccccttctgtattccccttaaggtggccagctcgaagcagatcttaggtcggttgtcatgcgaacatccttgctacgatcagcacgatcgggcattccgtacacaacccgagcgatcttggatcgagccgctcaggagcctaccacagtccatggatggctgaaatcaatccgagcgcacaagaacgtctcatttctcgaaatatcggatgggacctcgtcgaacagtctccaggctgtggtgaagggaccgttgttggcagaattagaggggtaggtgagctggtctctttaatggctcgagagcgagccaatctgacgaccgctttggtactcccgacagactgacgcttgggagtagtctcaagctagatggagatctgaagcagagtagaggcaatcaggccttcgaactcttcgtcaagtctctggaagtgacgggctcttcatctgcagtaagcgcgatccagattcgttaaacgagctgggaccaagactaaattgcggcactgggcatagacatatcctatccaaaagaagtatatacctcccgatgtattgcgagaccatgcccacctacgtttccgcacgagcaaagacggagctttaacacggctacgggacacggttatgcgagaatggcatgatcactttgaggtacgacaagagaccaaaatccaggcgccagccttacaagtcttcgctgacactttccactcgcttgacaggcgcacgaatatatccacatacatactccaatcatgacgagctctgactgcgagggagcgggagaagctttcaggattacgacggatcctctcgagcctccctcgaagccctctatacaaaagcccgaccctttctttccatcccctgcatacctcaccgtctcatctcagcttcatcttgaagctccaacacacgcattgtcccggacgtatactctctccccaacgtttcgcgcagaaccctcggcgacgtcgcggcatcttgccgagttttacatgctcgaggctgaagtcgcgtttgtcgagacgctggacgatctcatggacactgtggaaagagggatcaaggacgttttgaacggtgtcttgacggaaggatcacgaaggggggccagagctaggcacgacctcgaggtcatcggcaagagcctgactgaggacaaagcagaaggcacaacatccgacgaagggcccacttcggccgaacgaatacacatgctcgaatcgttgggggacaagccgtttgccagggtcacatatactgaagccgttgagatacttgaaaaccgacatgcgacctcaccctttgactttgcgcctgcatggggagcggggcttcaatcggaacacgagaaatacctggccggacaggtttatggtggaccggtctttgtgaccgactatcctcgagatcttaaaccgttctatatgcgtctcaatggtatcgatcgtgatggcaggcggaccgtcagttgtttcgatctactggcacccggtatcggtgaactggcaggaggatcgctaagggaggaacgtctcgcccatctgatcgccgcgatcgacaaggcgcgcatgaagcgggaagactatgaatggtacctcgatttgagacggtacgggtccgtcaagcacggtggctgggggatgggtttcgaccggttcatgtgttggctcaccggggtcggcaacgtccgggacgtcgtcgctttcccacgttggaagggacattgcaagtattaggtagacagcatatcacatcgtgtgcgtatatggtatatgatacagtagcgatacaaatccacaccccgcctgtcgctgcgaaagagccccgagaccctttgatcagagcgcaatcctgcgagttccgtcgaatcacctcgtcacgacaactaattataagtgggtagtctccattcgtatcctcgagtatagatccgtctcatcgctgcaagacccctgaccagatggcgacttccatcggagggtgcaacatctcttcgccttcttcctctctgacgcgccgcctgaatcgagcggtggtctcggactcgggcatcttgatgagaaaactcgcttccaacggtaataccttgcgatcgcctatcccatcgccctcgccatgattcgtcgcccgagctacacgctcgacccatacgtcgcctcggtctccttgctcctcttccggcgtagcgggactgagaaccgttcggcctccgacagatccaggacgtcctccttgggttgtatgcgccatcggcgaaagacccccgggtggtgccgaaaccccatcagacgagctgaacagtgaatcgtgccaatgatgccgggcggcggcatatcgggcgttccggctggatgcgcgatagtcgcgagggacgttgatgttgtgattgacgacgtaacgtggttcatgttcaaccactgtaggacgggtcacgggggcaattggcgtcgaggttgggtgaaacagcgaaaagggctacagtccaaaacgcaaggaaaagtcttgagcgatgctcgtcgacacagccagtcaaccgatcgtcgactcacttggcatgccggcaattcactgaagcagaccgtccccttctcgtctctttccgcatcctcttgtttctcatgctccatcttcatgtcaaactcgtaaagctttggcgtcggtcccaaatctctcgcccgcttacgtctccttcccccggcccgcccgtacatcgggttagacctctccgccaagtcttcgctgagcaacgtcaaccaggaagccgaccacctgcccatactccaggtcatcgtatctaatctgatgttaagctgttccccccgcctcgcggagatttctcctcgctcgacggcttgctggatctccacccggatgcgtcggcgttgtagccatccccggaggacgatgaaagacgaggaacagatgaggagtaacaggagagtgaggaactggcgaggtcaagatgagtatggcagacggcatagccagaggaactagtatcagtcgatgctatgcattgcgggtgagccggaatcgactgacgatgatcagatacaagctaggcggggtccggctctccgtatcgtgattccccgtaacgttcgagctcgacgtcggtgacggcgcggcccatccgaccctcgatgtagtcatctcgaccgtactttgtcttttggcgagatcgagaccgattcgggatggtcgagttgatcgacgtcgccgtcgtcgtttcgctcgcggtttcgtgagtaggtcccacatggcgggcactggacgtatgccgggcgagtcttatctcgagacaacagaccgaaaggacgtgtgctgtctattttgctatcttgacgagactgtggagaccggcaatgacaggcgacgatatgtgtgatctgtgagctgatgcttctgtgatgacggcgacgatgatgttgttggttgacgcgggtctggcgacctgttagctagcttgttacctgttcacacatcacagaagtgagaaaacccattcggcgccgagtcgctgctgcagctggaccggagctagtcgagaccgaacagtccatccgctagctcgcaaacgaccccgggtgatccgagcccatggccgaggttcccgccaagaacgccagtttggccgaagacaccgcgcggaaaaaagggcaaagccatgaaatggcacacgtaacaatgggggagtttttcctagaagaacaaccacgacggaatagcctagtggttaccggagtttggagcggtcgcttccctctggtgaatctgaagcggtcgcttcgattcaagcggatcagaagcgggcttcttatctacgaaaacacaagcgctcgcttctgtttttttaagtcctcatactcgtttttacggttgctgccgtgcaagtcctcgacgaataactatgcaaaaggaaaaaaagaaaaaaagagggcaaaaagatatgctctacaggtcggcccgggcggcgacctcgcgcctaatcaaacgaaaaatgacccgggcgggcggcgtttggataatgctgcatgtcgtatgacatgccatctcaaccccttctgtacagaagctacagagctacatgaggagggctctattctaccacttgtactattgttctgactatcagcacgatgagaagaccatattcgagcgctgtcaaacgatctcccgcatgggtttacgaagtaaactcccagcgcgactgtgtgaaatcaaagtccggtcggtaatggtcagcgcccttgcctgccgaaggtcttcctttgggaccagcgcgacgcacctcgtaatgcccctgcaacgtgtcagacaggatgatccccgcccgcttctcgacgtaattggtcttgttgaccatgtcagacttgagttgcatgatggtcgtcgcgtcgatcggcttttccagcatctcggacaaatcctcgaccgcttgttccaagttggcctggttatcctcgaagatgtgggtcgagttgcactttttcaagctgtgtcgaaggatatgaacgggatgaacgaggccgttccttgatattctcatcccaaacatccgtcaggctcactaaaaggccatggcataggtccactttaacgacattctcgcttccaacaagacgtccgcggctcgcttgacgaattgcacttcgatccacgtcaagtcgcttccgttctgcatctcttccatcttgcgctcggtcttctggtaaagttgctgatcgagtttagcagagagttcgtgattggcccatcgattgaagtactacaaacggacaactgtatcagctcttcctcctaacattgggcaagagtcaagggggccggacttacgtgcaagtatctctggagactggctcggctcttttgttgcgtatcccgggcttcttgaccagccttgtcgtcgaatcggttacaattgtaccagctcgtcccatgagattgccagtcgccctgacagacccagcaaaattcgtctagaaagccacattgccagcatcagcaccaaactgggatgtgctcgtacgctaatcgatcccactcacatcgacacttcttgcatgtcatatggctgtactcaaacaacagattcagtccggaggttcgacctcgactgtcccgatggtaagactcacttgcatcctccatttttttcgatcgtcgcgttacacttggtgcactctttcgtgttggccatcaaccaattcccagtctcggaatcatctgcgcatttcttttcccagagctttacgtatcggcaggtaagcggttgatgattcttggcatatccgcaactaagacgttcaacccggtaagactcttggtcagcaaagtgttctatgcgacaagaccacgcactgaagacacgaaactcacccgaaacagaaatcgttgccgcacgcacaatgcacgattgggatgatctgatccaatttgcgggcgggagcatccttgcagaacacggcatattcgcaaccgggatgagggcaccatcgcaattgcgggctatcgtcgacgtaggtgcgatccagcaagactcggtatctattcgtcagcagatcggcgtcgttaggtgaacgagcccgatggtgatcctcaacggtacagactcacctttccttcgccttgtcatccaccaacgtcatgaccgtcttctctcctacgaccctgccgcatccatcctccatacactgtactcggccgctttcttgctcgttcaaaatctttcgttccaagtattccgtccaacatcccttacagaacctgtgctcgcagccgagactaagcgtctgctcggcaatatcttccggctcgaaatccaagcagcatacaggacactcgaacgcttccgtcggaacgggcccggtgcgagatttggacgaagaggctttcgcgttggcaggagaaggcaggggtttggtactggaagatggcgacgagggaggagaaagaccggcagcgtgcagcgtcttggctggttcttcccaaaatttatcgctcagcttttccggattccagtggtaatgacgcagcaaagttgcagcggtagatggctgtttgacaagacaccgttggcaatcagtttggcgaggagagttatgctaaaaaatgagtagccccgcttacgtcgctctcgatcaatccacagactctgtcgaccaagaccttctgctcctcttgaagttcctcgacgctcttgggcttgtacgtgatctcccatacagctttcttcggtggcttgtctgacagacgggtgtgacattcttaagtaaaagctctcatttattttgttgtgttgactaaaggactaacctgccactacatcgtcaaacgcgtcgtatgcctcgccgattgaagtctgtgagccgttgtctatcggcacacaaatattaagaacagaacgccgagaacatgagagactgcggtacgtaccgtcttcgatcccctcatcgtcctcaaactcgatatcatcatagtccatttcttcgccgtcggacgacatcttggctgcgtcttgcttcgaacttgtgtcctctggaacttcagtctcactatcaggtatgtacggcaaggtgatcgctggacctgatgggctgtccgacgttgcttcgaaaccaggaggcgaaaattctcgctctgccgtcctcttggcttgtttctttggtcttgtactctcgctcgacaaagtagacgagggcgaaagtggtctcttgatggtttgcgaacgtagggtacgatttgaggaagccaggatgagatgtgaagcttgggataaccttcaggtgaaggcgaccctttcgaggactgaaccgtctagcagagaatgatgatgactaatgtcggagtggtggcgaagctggtggagggaaattgctacgatgatatgcaaacgtttggaaaagtccgatctgtaaactactaatctgaccctgacgaagaggagtgcatcgaatgacacaagtcgaacgaacggaagccaagtaatcgaccgatcatggttacaccgttctcaccttcccaaccgatgaggacgactcggctccaaccgaggttaacgggagcaaacacctcatcagtcggccagtggaccccctgagccgctttgtttctggcatgatctattcaactttggcgaatcgccgttataaccctcagtctatcgatctcgtcgacgatatgcatgattcatgtgatattcgcttcacgatgagcctgcccgcgcataggtagtctacagattgccccctgggctgatcggcgctttcgccctctcactcccttaagtattgagcgagagtatgcactttatcgaacatcaacgtcagatatgacgtatcattgagcagtgcttccaggtgcttgatggcatcttcttccggaatatctagcatgaatttttcttgcacctgctcagggtcgttcgcgtcagctgaaaaactcgacagatagctcagcccgcaccctgctgaccttgagcactgccttgtccggctcgagacgaatatcctggatactagcgtcgaccatgagagcgatcagattcagtatcaagttggcatttttccgaaggccgatgaaggccgtgtagcacaagctcttgaagcgattgtaatggggtgaattgggtccgcccatagcgtcgaccatctcgcgacagactttgaccggaggcgggaatggttttgggtctcgaccgagaatgtatccaaaatcgactgcgaaaaaggcggtcaaaatacagaccatgttctggaaaaccaaccctgctcaccatggaagaaatggcctggaagaagtaggctaagcggtgagtcatgatcggtgagcccaggacgactcaaacttaccgtcaggtgccagcattagattgtcaagatgtcgatcgccgacgcccaatatatacgtcacaacagagtatccagctagagttggaaaagtgagcactactacaattgtatcgatacctacggacgaggccgatttcgtactcaccacagcttcgcacaaaagtgtccaacacgctcggctcgacgccaaaagtgccaatcgcaccttcgttggtgtgatccaccttgaggtaattcaagagactcccgtactctcccattatagcggccagactcttgcttcgcacaaactgaatcatgccctcggtggaacctgttgccaaaactgcatatggactgagtttgaggtcaagattttctttccgcaggagacggtccatcaaggtgaaaagctgaatcacaagctgatcctgtctgaggtcgtctccattcttgaacatgattggatactctcctgcgtccgtctcgaaccagaggagcattggaaacaggttagatttgaaaacggtggagttttctgctactaggttgacgacgtcgacccgcgggtcaagtgggatagtcaagggcgagggtagcggggataggccgtgtttggcatcggcaatgtagtgacgaagcttgtcgatcttcttgggtcttggatctttcgatgcacgcaattccttggccctggcggataagatggcgaccagttcaccttgtcgccgtagcatctcccgtcgtgccgcgccatcctctctctgcttgtgtcaacattagcgctcaaggtcaccgtcccacagactgcgctatgcgctcacctccatgagcttggtctggaattgaaacgctacccgggcaaacatcttgcctaccacacgatcttccgtctcgaccatcaagtaccaatgtagagccgtgcccagtaccggattttgtaccgctctcgcgatcaaaaagtcggcaagtccgctatcagtctcggctggagagcgagaaggtgatttgctggatagagcatcccgcgttcgctgtggtcgtgtccgtgaagaccctgcatccccattaatcgaggcagatttgacctcgaatttgagcgcttgtaccaattgtaacaagtatagttgtaattcctacaacatgaagtgataagatctctcaggcatcagtctataagaagagatgatttgaaagcaaggcaatgcttacctcatcatccgcccgtgccatctgtttcacggcgaacgccctgactcgaccgtcttcggaaccaggtccaagcagttccaaagcgtcgtcgatgccaacttccgtccacaaaggtagcagtacctccaccgcttgcctggcttcagctgcatcggaccaagttaccgatttaagaaatttggtcaatgaacgtttgaatgtgttgagtgagaatctgtaacgccagatcagatccttgtcctccggcgataatgcataggtcggcggctgacggaacaaatcctgtcataccggaaagcaagggccctcaatgaagattcagtcgagacgaactataccgacgttgggcttacgttcaataaatcccgcatatcgggcccaggcttcagctcgcgatcccctcttcctgtgcgatgactccttgccagccgtcgatacttggcttcgacggggttaccctctccgttcacatctgccatgatcctgatggactccgggtcatatatccgccataaatgagaatctgacgaaagaaaattcggcggtaacggcgacggtgccgtcgttgccagtgtcgcatttgggataggccgtggaggtagtggcaaggtcgcttcctgtgattagaagtctcgaaattgttgagcttttgaggaaaaatcgaaactgttcgagacagcgccagactgacctgttcagcgaaaactaccggaaagtcaaatctcggcagatccacatataggaacaatttattcgaattctccatctcccgctgcatcaaatttcccactccttcagtcaggatgagaaaccaataccgacgagttgtacgactgaccgcctgaaccttctcgatctgccgaaaggtaacgatgtccagccaatccagccgaggcatatcgccttgctcgtagtctttcacgagcttcaacagacgtcccagctcgtcgtcctggtgtatgtcgctcggagtagtgctcgcttccgatggatcaccttcgacgcttgggtgcaaaaaacatcgttgttgacctcgcttcaacgtgctgaaaacatgcgaaatagttcagctgaaggctggtcgatcagactgaacgtgtgctcaagcaccctttatccgtgaagaggaacaagcatgttcccccaactggtacgcctttgcccgccttttcgatatcccagagggtgatgaccagccgcgcgtccataggcaatgatgggtagtttatgggcagcgtgaggggcatgttccaactgggagcagagaagcaagcaattcagcgcacagagcttcgcctcacaaaaggtgagattcggactcacacgtatctgtccttattaaaaaccttgctcgacgtccgaatcggcaaagtcagcgcgcggcctttccttgtgaagagctgtatcgtcacatagaaatccgagaccccactgtggatcgagcatgttgtcagaagaaagtcatgatacgcctgatgcgccctactgactcgatctgcgcataagcatggcgggtttctggtttggccaagatttcgctgtagggtctccggggaacctttccttcgaggtacccactggcagaattgcgtgacaacttatcagcgggagacggtcgacaagctcatgaaagcttacccacattttcacctcgagcggaaatttcagatcgcaaagcttggcaaatgtaacatccttcgggtttcctatgatgttgcttcccgatggtattccattgccgccggtgacgggtccttgactaggagaaggagccgggtgggagcttgacatctgtcccgagagctggacctcactcgtggtaggcaacatcgtggccgaattacaagatctggtcctaggcttcttttgcgagagggacacttcggtcgattccgtcccgttctttcatgacttggtgcgatggcatcagatggagatagtagatgatcgatgaggatgataggtcgctcgaacactgatcgtcatcatcatagagccaggctcatacttcggacttgacctatccggaagcaaagtctggatctcggaagctttcttcccgggtcgggcggatgctaaaagttcgatcttgtgagcgatttccatcaaccgccggagtagtgttcaaaagtataaagtggttcgctttcgatagctatagcagtccagcaggaatgtattcttgatttgattgatgacgctgttcatctcctgatcaactctcactagcagagactggtctcgtgtatcgttcgtcaacatgccattggataccacggaatatctgacgagccggggatggaaggggaaaggaaccggtgagtaccggccgtaattagcattgcacttgtagtggctgaatgtgtggtacgacgactcagccctgaagcaaggccatataagtcgtccgctagctgtggtccagaaaaagaccatgtcgggagttgggaaggaccgcgatgaagccgtacctttttgggacaagtgagtcgatacatccctatgattccagttccaattcaataccgaccaaaccgggttgtcatctttccagtatcttcgcatcggctgctcagagcatcgcctcgggagcttcaacacctgtaggatccggcacttccaccccaaccgcctcccagtcggcgggaccgagcagcatgagcgtgatggctcgttccaagaaggaattcgccaggctcaagctatatgccagctttgtccgaggagaagtcatcgaatttaaaccgtcggacccccgtgcttcgagttcggtcaacggatttgggaacggcgcctcgtcgccctcgggatcggcgactccgatgcatcagcacaagatcatgaaatcccagctctggaacgtccagcctgtaccttcctcttcggcctctccctcacctgcaccgactctgtcagccaagacctcgagggttgatcggaagacggagaaggcgctggaaaaggccgccaagaaagcaaagacggcagaaaaggagacgagacgagcggaaaaggaagcgaagcgcacagaaaaggaacgaagacgggcggacaagaaggagaagaaggcagcgaaagccgaggctgtcacagggtcagaagccggctccgaaggcttgacggacaagaaacgaaaacggacgatgagggtggacgatgacgccgactcaaaggagcagaaaaagaagcggaaaagaagtacaggagaagttggggaagtcgagggcggtggactgcatgtcgatctatgatgtcaacacagaatcttggaaggatttggtatagcggcaacatattcgaaacctcgagaccggcctctttggcgccagtaatcacggctgtaaaacataacggtgtatcttgtgctatttgatatttcaattcaagaccctcattacagcacattctcatgacagcagcacattggaataaaatagtctcaatatccctttcgtactctcactcgtcatcgctcttgactccttcgaattcgctctgtgcagctgcccaagcgtttaattcgcccttaccatggggtatgacggccccgttccttcgcagatactcgacaacctcggctccggcccgactacccatcggtactctatcgacaatgtcccccgtgtctgccttctcatcaacagcgtccacttcctggtcgacctcgccaccgaacatggcagctcgagccagccagggtttagcgttgaccctaatctcggagttttccagctgcgacaagaacgattcgagcgcctgggcagccttgacccggctacgaagaacatgtttgatgaggcgtcgggttggcagtcgcttctttcgcttctccttgagcttgttggccttgatagcggcagatacgggtggacctccattttgccaagctttgacagcgtctggtggggtcgctcccacgggggtcgcagattcgggaataaacgacttgaggtagtccattggcctctctctggctttgggagtccagatgccgacaatcaccctccaggccgcgacgagtcgatccattctacaagcgagagcgctgttcgcattagcatccagagtcgttgtagtgacttctcctgcaaacccacctatcgtaattttcgtcgacgagcgtcttgtgcgacatgttgaagaggtaaacggcaccggccgcgatgaatgcgccgaccgatgtgaaaccgaacatgagccacatgaggagaaagacgatcgggtagacgagcagggaaaagaccatcccaaagacgatcttcatttgagcttgggtctcgagctcttccctgacgatgttttctcccagcttggcgacgtagtacatcggtagatggatgagcatcggcatcaggaagaatggcacccggacaagaaccgagatggtgtcccggatgagcagaatcagcgtcgagaaccggctcggtagcgggatcggctttgaagggtccaggttggtcggaacgggaaggtcggagagggtttggttcgtcaacttggcagtcaagaggaggttgttgtattcggtgagaatcgtcttgactttttcgacgtcggtggatgggaagggttgcgtgaacagatcaaccaagctgcgagaagtgcgattcggtgaaattctcgagggacccttgccacgatctactctgagaataggctactgacgtttgcgatacgtcgacaaagctttctggggccaaagaatgctttcgttcgaacagtagctctcgcgccattttagccgctattaccgcatccctgtagcagcagaatacaatcagaacggcgattcacagacgatatttccaggatattccattcactcaccaatccggcgcattgatagtcagcttcatcatctccaactcgagtttcctggtcactcgtttgacggccgagcgggaggatccctcttgtttgctcaagaactcctcttcgtatccctccatcctgatgggttccccgtacctttacattgtatgtgagcaaagacggcctgaccgatcagtttacggcactttcttcctgacgaccgcaccagaactcacgtaacgacgatccggctcctatacttgctcttgtccaggtaactcaacccgaccggcacaatgacagctttctttgctcccgccttgggtttaccatccgattccccatagagatattttagatattcgagagcgagccaggatatgccgtccttgaagggcaagagctggggagaggtgtgcgaggtcccttcggggaaaacagcaatgcactctcctcttgccatggctatcatgaacatcgaagcaatcaccatatgactgtatcagtccggtccttttcgttcgcttctcataagcgcagatctcaccttcaaagctacccgcgaacaagctctgattgttcttgttctttcgatccaccgggatatttcctgcagcccgcaggatggctccagcgatggggttactgaagaggacatccttgacctgcatacgtcacagtatacatagctcaagtaagaaagcacgtcctcggtttcactctgggagctagcttgtaccgacccaataatgaacaggatggccgtgaggcatcgtacagctcaacacggctggctgagagagacaatcataacgtgaataccaatcatccatttgtcaggaaacccatcagtggactcacgtcgacagccatgttggtatgggaacacgctctgctcgaatcgcaacgagcagaacaatcaagcaattagctaaacttcgtcgtgcttcgagagctgttattccttatgctaacaagatgatgggtccatcctttgggacgttttcactgccgagtacggtaatctccctgaagaaactcgtcaggcaattcttggccagggaccggatggtataatgggtatatccgaaaccggccgaggaggacgaagttgaggaggacatggatttgatccaggccgtcgtgacgaatcgtgaccggattctcgggggtacggcaataaggcgatgttatgcgattctaaggcttccctggagctgtcttcgtgaatcaatctcaatgccctggcgagagtgcgaattatgtgtgcacacaagtgatgaaatgtcggtcgtctgatctgggatgagctggattccgagagggcccagcagttcccaagctcaagggcaaggggctcttggcttcggcctcgctattccagttctctcaagttgaattacgtcacggaattacgagaatggctagccggacggtatggcttcgaattggcaccggaccgagacgagccgacgacccggtcgaagagacgaacctgaaattagcgaattcatgatgcgggaagaaccgatcaaacgacaaatctagctatctagacgtgatgaataacggacacggtcttgatatcgaatctccatagtatatcttctttgcttgtcaaccgaaagatcggacccaactttgcaggcgcgtggttgaagctgccgagcacgctgacgtccaaaacatgactttgtgtcaccgtggcctgtgaaagaaaagatcgacagacttcacatctcgtgaatttctcttgccgatgcgagcgctatccattgttttttactacaggaagccatacaacttcatacaagtctgggcctacctgcgccctctcgaaataaactaagcttcgggtctggccaaaccgcctcagcaaagaatcgcagatcacgatgcaaccccatcacttggcatctcgactcgactcccaagcagacgtttggggttgtttgagatgtttcccagtatcataggatcttccatgacagaaagacagactctgcgtgctttcccttacttgaaatcttgagtggtccctcgccacgcttgttcaggcctaaataggaaccttctgccttctgcgccaggcgcgactttgcacgagcgaggcaggaccagtcaacatgtatggctcgcactacatgtttttatggtccgattcggtgatgactctcaagccatagtccggtccggttgcaacatgttcaaaagcttgcaaaacgtggctatcgtcgagcgcgcttccctcaccggatgagctaccggcgcgactgtctattcagtgctgaaaggaactggattacaactagcctctcatgatatcggaaggcgatgaacagccgaacgttaaagtcgcgaccgagagcgagagatgtcttgacctcaacatggtgtgcgctcgcaacacctgtttgactgagtcgcaactacgtgacatctattcatttggcgtgacccgactcagccacctgcctgaagttgagcgagagtcagggatatcgcatccataagaggagaacgatcaggtccgagtgattgcgcctccaaggctgttgcacaacctgtcctcacccacctgctccgctagaagcattgccgacctgccgggtcggttgctcgacctttccggaacctttttcgcacgcgacgagatgggaccggaatcaaatgtttctagcggattcgtcagattcccaaccgttcgcccgacgagcatacacacacacttgacaaggcgtccttgggcccatgtcacttaccacctggaatttgaatgctccctctgccctctcaacgaatccaccagacccaactaatgagcacgggcctcaaacacacgtcatgattaacggccgcaaacgacatcgctctccttcgacatcttctgacgagctcgatccgtaccgtcgaccccgaccagcgggttcagccggaggatactctacccgtgaaccgacattgtcccccactcgaccaggggatactaccgacctcgagacaagcgatggagagtacctctcaggcttggatgtacccgaacagagatatggagaaggatcttgggtcgaggaagcaccggcaaggaaacgacgaagaggggtgttgcggaacaagatggagaagatggggttggtcaacgaggagccgacgatgattccgggaaatcctgcctcatctgccactacgggatggaacttgcctattcacaacaatgctggcatatgggcgggcgcctccgctactgtgtcggacgattcgggcttggatctgagagagacgagcgcaagggaacggatcccattcgaagacctcggaaaggtagcatatcctaccacaatcgagactcctctggaggagatcgggtacggtaccggaccttcgatcccgccctcgacctctcgagctcagttcccgggctcactgggcgacgatgacgatagcatgatgatggatcaaaacggccgggatgaccacaaaatgaacccgcataacactcaacgaaaacggcaaaaaacgtggtacgagcctgaaaaggatcggatcgtcgtcacctcgctttccgactctgaggacgacgacgaggatcgaggccatgggtcaactatgaccggcggtcgtcctggcaaccgatcttttggcgttacagacgggttgatcgacctggatgacgaatccgaggtcattgacataacgcaccaacgacccgacaacgtagaagacgaagacgacgatttcgctcgatcaggaatgcatccgttcctcaacaacgctgctactgccggtcgatacacccaaccgggagtcaaggggttcacgatctcgccatcgctgctctctcgactcaatcagctcaacgaccgtcaacgcgccgagctgagcctgggactcgggctgggccgaggagggtgggacgaccgattacgagctggaggtgcaccggatgggaaaggcttggtgctctacaaagccttgcgtgggccgagcttggaaggccaagggcacaacccgttcggggcagggtattcggtcaagtccggtggggcagaagaggaagaccgttcagggtcgaggtttgagctcctccaggatgacgatgatggaaggctggacgtgaccatggatggtggcatggaggttgacgattctggattcaccggtggtatccagagcggatcacaagcagtgcaagggatggagatggatgacatggagatgggatgaagacttgtcgctagcattgcccgtcgagggaacgattcggtgtgtcccagagttgtaaagcggcatcatgaatagaatgcataacccgtcgacgtcactgtctactggcgatgatcagaagcgtgaaaaattcccaggtcatgtcgatcgtcatgtacgacatttctaggatgtgcaggtgaaacattgtggtatccgagcgagccgtactactgtactttcctatactctgtactcgactactgttttgtatcgcgatcgattgacccgatcgtttgttagctttcaaatcggcgtccaagcctaaatcaagcgcgggggcgcggggaattgcaactctgattgctcggggccaagcgagcgagctgagtgagaatgtgggattttgatcacctgagaagatgggatcggaagagtcgacaaaggccaagcttgcagctctttaggacaatgagttcctccagattgatcctctcgccttgccaacaggcgagtgtacctgctctaggcttcaaagtcttggccataccctaataaaagtgaagagtagcataaccgctgtcggcgctgggcctccctgccgcacgttgtttcccgcgtcatcaaacgctcccgagagcgagcaacctcccccaggagaccagctcagcaagcacgcacacacggcaaaaggtcgtcctgacactggttgtccatccgatcatcacgatttcgtgacctgattattacacagctcgactcgtcaaagtgcgcatttgcactcgggacacactacaagaaacacgtacgaacgaatcactcagagacgaccagtcccttagctcgcacggcaaccttgtccgtctcgtaaacccaccgccggtcaaccccggtccattccgctgtcgcccacctcgctagcgttgtgctcggctgcgcaggtgttgagccacagcaccagcaatcatcgtcgtactcaacacactcacagagagcgaccactagccattcgggtcagctaaaaaccggtcccaggtcgccattggttcggaaccgccttgctcgagaagttactctcgactaactagtgagataaacgtgacgtgagaagacccgtcaaagcattcgactcgcccggctcgacatcgatatcgacgtcaccgacctgactccttcgatcgacggttccgcccattttttgctcatacagcgaggtgccttccgaacccttctcgtatgaaaagaacatgacccaggaatacggtcacgatccccactcgtcacgttcctctccctcgcttccgctctaccagacgacacctcagatcaacttgcccggcggatatcatcatcagcagcagccgacacatcagcaacagcaacaggcacgccaatctccttacagcccaacagcgggtccgccttcctttggccggtctcaaccaccacagtcgccaggacaagcttctcaaccgcagcagcagcagcttcactcggtgcacggaggtatgccggcgtattccatcgatcaggcgtttgccaatgtcaacccggggagccagacggatggacgaggaaggttcgctctgggtgcaggtgcgggagccgagtacgactcggatccgagtgggaatcgtaagcaacaacatcaaatgcagcaacatcagatgcaacaacaacggcagtacggtgcacccatgcatcagtcacagcaacaacaaccgcaaggagttccagggggcggatacgggtcggctcaacaaccacctggatcgaatcgacagttgacgggtacgggtggagcgggccagcatttcctcgaaccgttcacatcggctctcgcacgatctgcttcgctgggaacgaggagaaaggggggtggtgcggccgacgatatcgaggcgggcatggcatttgggtcgaacggaggtcaaccggcaggaggagtcggtgcgcttggaggtggaatcaacccggaacacgacgtcgagattggagacggagatgggttcggagctcaacaatctcgatgggggttcggtaaacagaatacggcgaatcttcctcccgtttcgaccgggtatggttcttcgtccgctcaccgatcttcactctcggcctatgacccttacggatcaggagcgtcaaacaatctaccttatatgggagatgcgcctcaactcggtctcgagggtcagacggccaggagaacatccttcaaccgagcttcctttgcgagtccgacttcaccgacaggaggtatgatcccaccgcctagtgcggggatcaggggtcagtatgggctccccggaggtgctcagcagcaacagcaccagcaccatcagtatcaacaacagccgacgtcgtccgggtcttcgtcttacggcgcacacgggtctcgaccgggatactcgccgggggccatctcgtcatccctcgcggcgtcgccctatatgcagggtgctcaggcaggcctagacgagccaccattccagactctgactccaggtggaccgttcgatcacgtccatcagcaacagcaacaacaacaacaacaacaacaacaacgaggaggtgatgggttcggtcaaccgcgtcagccgttgctgaaccgaacgtcatcctccgacgtttcgtcaaacggtggacaagggttcggattcccaaactcgaacattcccgcgaaacgcgaacgtaattcgtcgggatccagtgcgggtgcaggttcgtccgtcatgggcatgacggggatcgagagccagcattctcccatcggacaattctcgacttcgcccttgttgtcgactccggcgagcgtgccgggctcggctcatccgccgcccggagcgctcggaggtcctcgacaagcgctggcgaacagatccagatcgagtcagcagctcaatacatctcgagcttcaggtggagcaggagggttgcagcttcaaccctcggctatgggacctgtcggcggcatcgtttcagcccctgggatctcggagcctcctcgcaactcgtccagggctagggaagctgaatacgaaatgacgggcatcacgcgagccagcacgtcgaccggttatgccgacaatgacaagagggtgggattgagaaaagtcattgatcccgccacagatctgcggccctcgctcgatactcaacccggagaaaggcgagcggatcctgatgtgcctggagcgttcttgagtgtgagtcttcgcggaaaggctaaaaacccgattctggcgtgctgacgtgtcttcgccagcctctcaaatgtttgacgacccagttggcgcagacttacagtatttgcgatccgtcgttccgatacgaggctactcacaaccctcgaagggtcttgaccaagcctagtcagccttgccataacaacggttcagacaaccaggactatgactatatcctctacgtcaacgatgtcctgactgccgacaacggaacaggcgacaagtgagctgccgctgcccgaaattggttcaagtcgacgtgctaacacgtggtccgcctctgtaggtacctaatcctcgacgtcttgggtcaggggacctttggtcaagtcgcaaaatgccaaaacatccggacgcacgaaatcgtcgccgtcaaggttgtgaagaacaagcctgcatacttcaaccagagtaccatggaagttgctatacttcagctggtaagcgccatcaagcgacctcactgctctagctccgcttactttagttccttctgcagctcaacagcgaagccgatccgaaagacgagcaccacatcctgaggatgcgagatcagttcattcaccacaagcacttgtgcatcgtctttgaatgcctgtcgtccaacctgtatgagctcatcaaacacaaccagttccgaggactaagcctgcagctggtcaaaatgttcacgacgcagttattggacgcgttaacggtgctgaaagaagcacggttgatccattgcgatctcaagcctgaaaacattctgctgaagaggtgagtcagcacgccagcggctcagagctagcagaacgactgaactccgctctttatagcctcaactcgcctcaaatcaaggtgatcgactttggttcggcttgtcacgaaaggcagacagtctatacctacatccaatctcgattctatcgatcgccagaggtccttctcggtctgccttactcggcagcgatcgacatgtggtccctcggctgtatcgtagtcgagcttttcttgggactgcccatctttcctggaacgagcgagttcaatcaggtctcgcggatcacggatatgctggggtaagtttgagatgggttatatttactcaatctatcgaagggtgtgctaatacgctgcggttactcagcaaccctcccatgcacctcctcgaagtcggtaaacaggtcaatgagttcttcaatgtcatcggatccgacgacatgggccgcaagaaatatgcgctcaagcctatggagcaatacgcgagagaacatcagacggacgagcagcctagtaaacagtatttcaaggccacaaagttgcctgaaatcatcaaggcgtacacccttcctaaaaagatcaccactcaaagcgaggttgacaagggtgagtggcgtgacacttgcgcgctttgaccgtagaagctaaaaccgcccgccttgtaccagaaatgtacatcaggaccgtattcatcgactttgtacagggactactcaatatggatccgatcaagcgatggtcaccgcagcaggccaaattgcacccattcatcacgggagaacgtttcactggacattgggaggtgagctcatgcatacgcagtcctagagcgatcgtaatcatctcaggtcggtcctttacagccgactcagaagagcagtgcgacttcttccagtagcgctcgacaagcatcaactgccgacagccgctcacaacagaacaagtacgcgagcaccgtcgatgccgagacttcgagagcgtcaagaggacatgccgatgcaaatgcatacaatcagtatgttcatagagaactcagctataggagttgtctgatgtatatgccaatctacttcacagttcatctactcaacaacaacaatacgctgcacagcagcagcagcagcagcagcaacagcagcaacagcaacaacagcagcaacagcaacaacaacaacagcaacgccagcagcaacaacaacaacaacagcaggaagccaagaatgcggcagcggccactcgaaaaccgtatttcacgtacgatgccatcacttcggcactcaatgcgcctcaaagccagccttcgccctatcactctccatcacagtcggttccccgtttgccttcgcaacctcaaagtctcagtcagaaccagttgcgggcacatcaagcccagccgcgcattccttcaaacggccatggcctgactgccagcatgtctgccggaaattacgggcagcgacagccgcaaggcgaagggcacctctctatcaacgtgtcgaaccctccgcccagctcgtattacccgaacaatactacccgcagtcgcgccaacaccatcaatcggatggacgtcatcccgcctgctctggcgcgactgacccacttgggcgcagccgatcccgctggtacgagatcggccttgacgccagtgctgaaccgagacgacgcgatcagagagtgggagcgacgaaacacggcgcagctcgggcacgcgaagcgggcatcgattgccgtgggcaatcctcagttggatttcctgcaggagcaggcagagatgatgggacaagcatggcagagccagtacgggaacagcgcagcgatgcagggctatcggatgcaacctccgcctcccgtcttggaagcgtctggtcgtccttcccagcatcgttcgggcctgtcgaccgactttggcatgatggagccaccaagcgcgacgagcgcttcatctcctcgaacgtacggaagctctggcggctctggatcgaataccgcatatctcccggcctttcctccgccggcagcgtcggctttcgactcgtacgacccccgaggcgaatcggccgccatgatgtacaccccgctacaaggaggcgcagcaggttatcacaaggcctcgggctccgtcagccagcagaacccattcgcgaccgcgcccaactcgccccagtacggatcctacatgaacacgccgtacagtccacgacaggcgaggaagcgaagcgcgggtgaaggcaatggcaacacgtatggaggagcgtaaagagcggtcgcagcaaaagggacattgatacgactcggtttgactgaaaaaatgggccccaagtctgatacgatatagcattgcatatgattagagaatctcgaccatacgatgacattcgccggcatttcgccttgttcgtggtatcgctgcggaagacgggacgtttatgtcacatttgatcttttgacatcgcttctctgaaacgtgcttttgagtcatggacgatcccgaaaggcctctccaatccatccagctactttgatcgcaatgacgtcgctgtgggctgtcgacagtcggattacgatcagcttctgaaacgatcgagagtgtgtgcccatgggaagcatatcaaacccaccgagacagaaagcgtggggtatgctatccacgcaatcgaccaccctgttcgagtctttccaatcttgctcgaccctatctcctttgacacccctcaagacgctcttgacatcgttgccctgcgttcctacccaaccgtccggttctccccagtaactccataatcgtcgcctctctgactcgaaccaatcgaggtctggcgctttgatcgtgctcatctcggactttgcgaggtggagcacgttttttaccgtcgagggggatgacaggaaggtgagcgtggtcgcgttcggagcgtagatggacctcgaaccgggcaagttggaaggtatgatcgagagaagtgatcgaatggtccatatgagtggttgaatgaggctacagatgaacggtagaaggtcgatcaggggaggtttgaagatcggccgtagcttgcgtccgttcggtgtctcggcaatatgggccaccgtggggaagaggaggaaactggcgacgactttgcatgaggcatcgtcttgatcttccgaccgggcacgttttcggtctacttgtcgcatcgtctgaacgatgatttctgaaccgacggaatggccaatgaaaccgatcctgatacctcgggcatcgaggccctcttgccgccgtgcctcagccagttctttgcttaacgactcgaccagttggactttggcatcgatctgttcagtcagtgtgagtggtatgttggggtgtggcaaggttggcgagtggccgatgtgagaatgcgcgaggagggcaaagtgcggctcgatcagagtctgcagtttaagcaggaagggcacgtaatagtcgaccagtccggggttgcctgtcacggtagatgaggagattggtcagcggtagcatccaagcgttcctcattgtctttgcaagctgacctggtacaaagaccatgatgtctctaggtaccttgccgtttcgaggaggatagtaatgcacctcggccggacctcgagtgtgagggaccgtcgcggggacgtatcccttgggacctggtgttcgtgtgctcaagaagccgcatcgggccatattcaacgaccgagtttcagactttgattgagtgacaaatgtcgatggcgagcttgtcaagcgcttgagagataggagatggcttccacgatgcccagttgtcaattgtcaaagacgtaaagactcgagccagaaacgaacaagggataccggaagcaaattgatgacgtaagaccatcaccgagcgaaaaaaatacatccggtcaacagcgatcacgtgacttttgatcatttgcttccactccccaactatgccaaccttctggttactcgggtgaaaccgaccgaaagttgaacagataggtcattccaaaagtaaagtaatgactgaatcagaggcagccttcacagtcacatctgcacccctcacctcaacggatcaacctcaaatctaagcatgtcatcacccaaacgtatcaccgtcctaatctcgggttcgggtgagtgatcacaggtcgtcatcgacgcgacaaattcgacgactgacgatcattgatcattgccaggtaccaacttgcaggctctgatggatgccgctggaactgctcgtctacccaatgcacaaatcactcacgtcatttcatcgcgatccaacgtcaagggcctcgaacgagctgccacgcacgaccccgtcgccatcccatcacaagtctgcgcgctcaagacctttctcaacaaggtccccggctcgtccagggaagactatgacaaggaagtcgcccgtcgcgtcgtcgagaccaaaccggatctggtggtcctcgccggatggatgcacatcctcagccccgcctttctcgccatcctcgaaggcgtcgagcgacccccggcgaccccccctcaactgcagacgaacgtgacgaacccttcccccgtccccgagactccgacgcactttccgatccctatcatcaacctccacccggcgctccctggcgagtttgacggggccaatgctatcggtcgagcgtacgacgctttcaaggagggcaggatcacgaggacgggcgtcatggtgcacaaggtcgtcgccgaagtcgatgccgggaaaccgctcgtcatccgggaagtgggaatcgaggcgggtgattcgttggatgatctcgaggcgaggatgcatggggtgagttcatacctgggtcgtgcagggcggctttttctgcatctcaatgttcaaggtcgacgtgctcgagctgatcatccgggttccgagtccaggtggaacacgagatcattgtcgacggcgctcgagtcatcctggaatcactctccacataggccttgctaggaccagagtggaatgatcggaaagtcatcacgagaatgttgtatccggtaatacatgagatatcgcaagcttcggaaataacacgctcggcctcgatcaccggctccttcataatgctggcaccagaaaatcgcgcttgtctcaagaagttgctgttatttggctttgccaagagcagggccgggatcggagacactcagaccccgaaagtcagagagaaatcagccgcagccatttcgccgacacaccttgttctggtgctgttcagagaagaggatgggcgcccccagactcataataaagcacaaagcatcgagaatgacggcgagttgctgtccagtactgtcacttgccctgctgccccgattgtcgcagtctcgagcccgagaagacctccttaccctgctcaatcattccacaatatcccgcaagccgggcaacaatacctggcttgaggtcatttgcgctattgcaaagtcttctcccgtctctcatctccgtccgtagtaacatgtcctccctggatgcgaggcggaggcccgaggaagcccagctctgttgctatgacttgaccgaggacgcgagaccgttctgcctgccaggggtgtctacgttttgcttctgctccctaggacctcactttctagcgctgtgaagttgtatactgcttgtcatgcaatccgcaggaaagggaagacgcaagagatattgaatgggaaaacgcccctttttgtggtagtctgatgctgcgagtcggcttcgctcaggcatttcgcgggtctcgttcgcgctttgcaagatcgtctcggccattcgtcttgttttgacactgacagacatgatcctctattctggtcatgatacaagctcgttccgtagtacactcgagagaccagaccaaaccgctcgccaaaacaatctcattgcaacgactcgaccgataatcctgcttgccatcggccaaatctcctgatcatctcgagcatcgccggcaggaggacgatcgtcccgaccgagatcgggaagaggacgatgatgatgagcgacgagagaacggtcacaaaggccttggttaccaggatatggtacagacattggtacgacattgggtctgtacaggatgcagcgaacggggaggcatcagtatccgaaaagaaatcgcaccgcaaacacacgagactcaccggaaaacatggcccagccgtttttgaggaaatttctctcccaaacagggttggccacctcgccatgattcccatcgtgaacctggacgaccggtagaggcacaccgttcggtccttgtacgaccttgacgcgcttgaagattgtaaagtagacgggcttgggaatgttgctgcgcagtggcgaatgaaagtagagctgcatggcgatctgtaaagataccggaagcgttgtctttcaatatactgtcggaagtgcaaatcgtggtggccgacttgagactcacctctgctcgacaagccgagcgagccaggatcagaacgaggaaccagaccatagctcccaagggtagcgtgatgagcaggaccgtccccaccagcgtccctgcgatcaagatgggccagaggaccaacatctattttcaaaccgagcggatgtcagtcgacctcgaccggatagacaagcggttaacgtgaactgaccagaggcaaattgatgaagatcagatggaccagcgccatccagtgtgtcacgctccataacggcgagaggtatcgcacgaccggatgtttcttcttctttggccgggtgacgacgatcgcctccccgtttggcgtatcaatgacccgcaacgtcggcgtgttcatctgggaaggcgcccggagcatattcttccaggaggacggtctcgggcgtcgaggagtcaccagagcttcagggtcgtaagacgtcccggtgaccgagatggaccggtgcgatcgggtcgttggggatcgagcattgtcatgacgatctccacctccaggcgcgagcagaggagtcctttcgtctgccgacaagaggttgtttctcgactgagcgtattccgaggacatcctccctagagaagggggagctgcccatgtggcgtctcgatcgccgccatttctggaagaggcgtcagacgacgtcctcgtcctcttgtctgctgccgaagcggtctgagctcgaggtcgacgggtatttcgaccgtgtcttgggattccggtcccgacgaggccgaggagattctcgccttcggccatcgagaaagtggccggggcgtaaggtggtggttgatcgcgatgcctcggagcgggtcgtgcggcgtcctgactctccccagcggggaacgtgtagagaggcggttgagtgatatcgggggaggattcgaccgaaccggactgtctgtaacgacgagaatgaccgttggaagaggaaggtcgggatgggaattcggatgtcgtgtgcatcaaagtctggcgggcaaggccgtcgtcagccgctggtcgcagtggagcaattgctgtgctggtgaggcgggattttctgatcagagaaggaggctcgcccttctggtcgttttgagtagacttgaaaggtgaccttgacctgacatgaacccttttccgaagcttcgagttgtcgtctaccgcacgacctagtacagtagtgctaccctacgtcgaacgctgaacgacggattccaccgaaaggacgacgacgacccagattcgtcaaaggaaagggcgacgcgcgtatagatcatgacaagtcagtcagtcaccttgtaccttgcacaccctgacgtcctggaaagtcatcatgttcatagcgtcgttgcggctgcgttacaaaatcatacaagcccacccgtccattcgctgatctttaagcatttgactgacgggtccggaacgtggtgggggcgtgctatctccctagcaggctctcaatgcatcttgacgtccatctgatccccatcgtcctcttctgccgccttttttcctggtaaccacatggcctgatggtaatgacatcgcccgcattagcttttggcagactcgatctcgtaccgtgacaagaccgcgactcaccatggcgtcgcctgcagaagcaaagaccatgtactttgggctgaacgccactgcgcgacaggtccccccggatttctcctcgttcaggagcgcacaagggttgaacgtcgggatcggcgctggcacgttctccatcatcgattgaggcttcggcaacctctcgtgcccttcgggcggtgacaagtcccagacgcagatcctgccatcccaagatcctataacatgggatcgaggtaaaaatctccccgtcagtcaacgggcacgacaagctgtccgcctaggatacgacgctactgacccgacatgacaaagcgagaatccggcgtccaacacacttcagccccactgagcccctttaccggtcggacggtcctgtccccctgtttatccttttccaaaccctcgtgcccagccagacgcgctatcacgctcagatcgtacgagtcgagcacgtagtggaacatgcccgacgtcccgacgagtaggtatcggccgtcgttggagaaccggatcgaggtgatgtacggatttcgtcttgggctggcatacttgtcgagctctgggtcgtcgatcgtgttgtactcgaaaggtgcctatgggcggagtgacgtacgggaaggatcattggacgagactgaccaggcgaacggtcgagcgactcaccttgtccaggctgttatagctgtacaggcagatatagtgcggatcaggcaaggctacagcaaagaccattcccgtcggatcccaatccgtcaaacaaggcccctctttgatgttcaatcttccctgtttcggtcgggaaggggttcagcatggcggtccatctgctcatgaccgacagtcggcatacctgtgccttgtccgctcgtaggtcccacagcaacaccgtcccatcttgcgcccctgtcagaaaggtcgtgtgcatagggttcatactgattgatccgacgctgcgatcgaatacgtatggaaaccgctatcagtatgtgatttgaggaatcgctatgctcacgctcaacacaggcgtaaggcttaccgtgaagtatgtccggaaaagtatctcaaataccggtccttctccgagacgtgtaaacgaacgtcgtcattctctcttgtcgaggcgtgcaagatgacccctcgctcgtgcgtcgccgtgacatgattggcgccgtactttgaggaaccgtggacggcttttttcctgcgaagacccccaatgtccgtcgatacccaggtttagcggtcaagcagaatcgagcgggcatgcgtgttggagacggtactcactttccgctcaagacgtcccagtaggttatgagatcgtcctcgcccgaagtcacacacgtacgtcctgtatcctcgaaacagagagaggtgatctgcttcttccctcctccgaccgactggccgttctgggtgacagcgtccggaaagactcgggatggtaaaaagtctttctgtaagggtgatcgagaggattacctgtctgagtaagctcgacgcatcgaggcagatcctgggttagctgatgacgtacgagaaggtctggagtgaggattcgtttcttcccttcctccttgatagctgggcggcttcccgatgccactggaccggacattgcgagatttcggatcacagggatttgagcaactggtacgtagaggtccagcgatctagcaaatcgattacagcgagaggattatcggagactgagttggaagatgttcaagttgcaagttgcaagttgcaagttgagaccggaccctcaaagccgatggatgttcgtcatatttcctagatagcttgaaatcaaaacgcgtcgcgttcgaattcgagacttcgctcggtcttcagctcggcaagtgacgcaaagctaggtggggagggggggggaagggtagcttctttacatggatttcgttgtcgtcgttcatcgaatcgtaactcggcatggaaggttgagcagcataaacgatcgattcggtgtgactattcgtatttttcgcaccggacgacatgccaaagttgaccatcgagcattcggacggggacaagggcaattggccttccggctggttggatcatgccgttccgatcaacaccaacgaaaactatcacgaaaaggtcagcaagtaagtcgaaagctcttgtacatcgtcgagccgctattagatcccatgctcagtcgctcttcccgtcatgtttgccatcgatcaatcaggggacacgtcaagcacaccttgttcttgcaaaagatcggccaacacctagccaccgccggaggtgtatctaaccgtgtgtagccactagctatctatgagacaatcgcttagctgactcttctcctgctgcaatacttgctcctcgatcgttctctaaccccagcggccagttacgagctcagcgaccttcctgccggctactctttgttcctgcaccacaagcttcaagccaacgggaccgaccgaacggatatctacatgtttgtcggtacacgctctgccgtgcacctcataaaggtatcgagggactccaacctttcgtcgctttcgacagggttcgaaatacgtcttgaagttccgaagtccggcagagtttttcgggcatgcaggtgagccggtcgatccccgagctcagagacgcgtcaaatgaattcgttcttgtcccgtgcagaatggcttcaaaagggagatataaaggatcattccaaggtaggagaaatgcgtcttgtacggtatcacatagatgctgaacggcgggaacaccttgatcctcgacctggacctgtagtgtacttgcaagtattccggcaatagtaccatcaactctggaggagctccgtccgattccaagcgtaaatcaacacctcagagttccaagcctccacagaagaaggtcaagacgtcggacgaggaggaacttgcgcggtataggaagaagctggatcagacggcccgagagcggcagaaagaggtcaagagcgagaggttgtaccgtgagttctattaacagctcgcgcaaagtatcccgcgacgcggctacacggagattgctaaccatggtctttggggcccttttataggaatgggagaactcgtctgggtcagggtaccgacgatatgccctccgccgggatccacagccgctgtaggcatcgacgagatctcatactggcccgccatcatcatggccaccggaatcaaggtgcatgaggatgagggagaacccggtgagatcatgcaatcgacgtgttacgacgtacggttctgtggtcgtctcgacaatacctcgagcgatacggcaaacaaacagggtgcgacgcgggaagagtccgagatcctgccatggcacatgttggcgccgacgcgaccggaccttacggctatcgccaaaaagtacgccttgtccgtcgctgaagctacgatcggactcaccgaggaaggggctgctgaggagaagtgggttgaaacgtggagacacgagacgatcaatcgaccttggcctctggcggatgcggtcaagcctgaaaattgggaaaaggtcgtcgtcgtctttgcgcaggcgttggtattcgcgaccgaagttgcagctctatggagtcagacggatccctactcgcacctggacaagatcccctttaatcacgatatcgcggcgaacaagtcgtatttccaggtaggtagatggcgcgcgcgcgagggaatcagcatctcgctgactgacactggcggcttcgacctgatcgatagggcttgtggtggggccctgaaaggatctggatcggagacctgatcaggctggtcagaccgaggttgagcttgcatcgagacaagctcaagccgctcgcgcctggcgctgaagaccgctccgcgttcctgagactcgtgtgagtgtgcctagccgaacgcgcgtgttgacccgaagtttggagcagggcgagattgtttcatactgaatgggtttgcgtcctcgcagtcagatttcagtgcagcagatcatgcgggaaacgaagccaacataccactgcatgatccatggcgacttgttcgagcttgccgaacccgaatgggccgcccggaacgatcctcctgccaaaggggtctcgggacagcctggcaacggcaacgaggccgacgagggctcagacgaggaagagcaggataagccggcgtatctgcccgccccaccagaaggtctcgtatttagacaggtcaacgagccgcagagcgaggtcatgtgtgatatctttggtatgctgtgactgcagacatcgaatcgtcgctcgtggtgctgatacccggttctcgtagatatcgctggccgcgtttatccgactttggaacaattgccctcggttagacctgcccaaaatggcgatgcttcagatgatccaggtgcagtcgaaggtattaaggatagcgtcgaattgaagaagaggctggacgcgttgatgggagtttcaccggtcggcgatatcaagacggtggtcaacgattggaaaggtaggtctatgtccagctgcctttaaaagcactgtctgacgcagtactaaccttgcctcggccgatctgcagatcaaaggttcaccgccgttacatctgctcacgcggcctcgacaaagtggttggcgaccgtctttgagagctgcagtgcttccgctgtatgaggttgttctttcgccgcatatgcacgtcgtttttcgtttccgtcttgccagtcgatttcttcccggcaccatcgccccttcgtttctcagttttgtatactagtatagcacgggtttcgtcattacgtcccttttacgtcttctgggcatgatatgcgatatgatctcttgtcgtctttttacatcagggctgaagtgagtagaggcgcggctcgaagtaggacgtcgctccagcttgactcggtttgtgaatagcaaatatcgccctcatagtcctttctcgccattactgagactttgcttcttacccgcccgtaaagggatacgctatcaatctgtaacgacggtccaagcccagtgggtatcagcaggccgaagcaatcataagcaagtgacaatagacagtcggccatggcggaagacgcagcaaaacgagtaggcactcgaaaacccactatgcagacggcgcagtccaggctcgtagatcgccgccgacgggcagctagcaacagtcctcttgttttctgacatggtcaacgggtcttgcactgtgcatggacgcacaagcgctagggccgcaggacatgatattcaacgacatcttgcagttcatgcccattctgaaccctcggcctcatcgccgtaattctgcatcagccgggtcatccaacttccaacacggcataagagcgaaatgaccattcagagaacgcgattttgatcaggtcgcaatgacaacggcgcaaactcggacgagcacatggtctgaaaccggacatgtcttggccctggatcaaacttggtcaaggctctacactcatttgaagacggattaagcgccgaagctgcgcagatacaacgctcaaaacatgcgcagcgtattcgatcttacgacacatcaatcgactgtcacggttattcaggaaggttcaaggcgatcgaacgaattcgccttgtaaagatatcctcggctacgcttgagacatgatggaaacatgtgcaacgaagttagacaggctgtagtagcacgactgagacggatttcgcttgcgggcttgtctattggttacggggccaaacatctgggttttgacattgacattgacattgacattttggcgtttgggcactcggccgaatccgtgctggtgggagcagaaatgaatgacttggaacagatccgtcccggcacttcccgccttatcgggaactcgaatccgggcgaaagcgagacagatctggacccgtgggtgatcgctaggtccaggggcaagatcggaggcacggtacctattgtgacgtctggtccgaagcgagaccgactacgattgtggcttgcccgtgggcccgcgatcgagactgtcgactgggacccaatctttcttcttgtccttccggtcagcctccgtcctgccgtcgcgttccgtcacaagcttgttcgttcggtgatcacgccccttccgccggtctcgcctcgctcttcccgcatcctcgtcaacacccgctcgttgaccggaagcagcgcggcggcaacgtcccgagcatcatcagaacggagaaaaggaagaaataaggtgtaaaatagtcatgatcgggacgggtcgctgtcgatatgcttccttcccctaaagcctgtgcacgttcactttgcagctctacacattgcacgcacagcttacagccaattttgcagcctttgcagccaaagtcagagaggaagctgattgcgtcacgatgcggcgtgcgatctgaatctccgcctcgggcacaacgtggctcgctaagctgatacgatgcgaggtccctgtgccgatgggagtcgcatgcaagacatgcaaactttactttgtaccagattcagctcttcccggtcatgccgctacctacccgagcagctcatcaagtggtaattcaggcaaggagctagcaagtagaggagcaagggcgagggaaaggtggcgcggcgtggcccgtctatttgtccggaaacatcatcattcggatccccccctgtctcgcaactttcgttttgttcgcgtggtgtaagcaaggtctggtgagggttcatctcttagctcgagacctcatacatcatagcgtacaacgtcctcatcgaagtctggcttctagctctagtataatcatttacttctagctcgtttcctgatctcaattctggcaccctggctacctcgacgagcgacgagccatctttgacatcgcatctcaagatagacaaactgaaaataacacacacaaaagggctaagatagacaaaagacgcacgtcagccttttcctagctcgtagctgtagagtgccttctcgaccttgctgagctgcgagagacctcaagagctcgcaaggatcgcagctccatctaccattcccaccaaactcgctctgtagctcgcccatagcagcaagagcaagagcaagactcgacgacagaatcatgacgttactcagcccaaagtttgctaggctccaggctgccctacccaggatcttcaaattccgactatcccgaatccccatcctcctcctcttcctcgtctctggatatgccttttatcggtacctcgcggaccctgccaactttgacatctttgacgccctggggttgtacgccgaggaagatttctacgattcacacctctacgactggcacaagtacccaggggcagcgagggcgggggatcatcaggatcatgcggctcattcggatggcaaaaagtcgcccggtcatgccggttccacaggtccagggatggacgagatcgggcaacaccacgcccaggacggtctgctcaactatacctcggtcgatgggctcgtccgtggttggacgctcaaggggaggaaccagaagaacgtgggcaagcggttgacgcacccgatagaggagctcatgaaggataacaagcagaggtgggaagatctcttgaaacgacagagcagaagcttggaacaggctgtcaaggagtacaagcggaggtacggcagactgcccccaaaaggtttcgacgggtggtacaagtactgcgtggataataacgtcaagattatcgacgacgtgagtctggtagggtaagaatctcgcaattggaatctcgagctgatttcaattcttgggtcttgggcagtatgatcaaatcaaccacgacatcgaacctttccttgcactctcgccggccatgttcaacgatcgtgtcggtgctctcgccgaagctcccttcacctagtaagccgtacgcaaccataaatacgaatgccaccgagtcgctcatcacacgatttcgcccacgatagtcacgtcaacgtcggaccggagactgaagcagcagtgacgggcgaacggtctggagctacccgcgccaaacagttcctcaaccttgtcgctcctcttggccctaacctgccccgaaacattcccatccacgtctcggatcacgacctcggttcctggatcttgggatccgatcagaggagcttggctttgagtcggattcataccgtgctgaaaaaggacgggaccgggttgaacaaggtcaagcatttggcgggcgctgaattgaagaggttggaaaacaagaacaggaacgagcatcgtggttggttcgtgagtacggatttgatagcggactgtgcatggcgacctcatcactctgcatcgcggctaacatcgtgctttctattgtagtcggcttgcgacgaggattcgccagcccgaggaaaggatcgagcgatggaaaacagacttcgagagctcgaaggccttccacctcttcctgaacctcccagtgcgtgccaaagttgctcagcagtgcggtcattccttgctgacctcgcagaattatgcagctcctgctttcgtcaaagacgtacgacctggattcgactggtgtcaaaacccggagacccaaaagctgcacggaaccatgtcgttcgatttccctcgagacaccactatgcgtcccatctttgtcctctccaagcacatgcgcaacaacgagttcctcttcccgcctatggaagcatacgaaaacgctaccgacgctcaggccctgaaaaagtacaagccttggtcggaaaagtctatcaacaagattttttggcgagggacgtcgaccggagacagctattccaaacgaaagagcgacccgacttacgattggagacgacagcatcgacccagattgcacctcctcgctcagcaagaagaagggaccaaggatgtctggttgcatcgcggccgcgagtggatcccagagaactgggccgtcaaaaagttgaacgagcattatctcgatgtcggtctcaccggcaagccgcatcaggtgagcctttgttgtgacgtcaacagagaccgctacggaaagttaatgattgtctgatcatccggtatcaagtgcaaccaagcggacggaacttgtgatgagatggcagccgagatcaaatttgccgaacggatcgctcccgaacaagccgcccaatacaaatacgtactcgatggtcagtccaggtcctatgattttcgcaactccgtccgtggctgatccctgctctgattactatcagtcgacggcaacggttggagttcacgtctgcaccgcctcatgacctcgggaagcgtcgtcatcaaacataccatcttccccgaatggcatcatgtcagtagaatggcgcgaattctcgactgacaatgtcttgagtgctcattttatcaacccctgaacgtcatataggactggatgacgccctgggtacatttcatcgtgagtatatctcaatacttttggtgtcaaagaaaacagcaagctgaaaaagtcccttgcctcgcagcccatgcaagtcgactattcggatctatacgatattgcagcctttttcatcggctcgcctgaaggacgagtcaagggtcgggatgatttggcacaacagattgctgaacagggaaggaagtttgcgatggagcactggagatgggaggacatgcaggcatatgtgggtagtttcgcatggaaaagaagacgcaaacgatcgctgatcgatcgactttgtagacctatcgtctcttgctcgaatacacccggctcatggctgaagaccgagatgcatggagctttggcgccgagatcatcggcgatggaatcgagcccgagccggtcgtcgctccggtggtcaagaagcgagctgttcggatagctcgggacgactaggacgataggagagttctagtagagggtttttaacgagtttcacgttcttctcgcattgcatttttcgtgacaaattacgcatatatccacatagactttgtatcactactagtacaccgagagggtagagctcactggctcactggcgagcttgacgatgtacgattgtcattacggttctgggatctcactcgttcatgctacgacagatgggtattcaactttgcgcactaaaagaagcgcgagtgagtgggattgcgtgatttccttgcgcgtcgagcaagttccactcggttccgctctggctcgctcgctctccttatctcttgatcaggtgatggctcatattcattggcatgatgacgatcgtggagatacgatggcaaactgcattgagatcgagaattcgaatcttcctaccagagacatacatacgcacacacaccagtactcctcaagccagtcactgagaccgacctcgatagctcgcatttccctgctcgaacccgctagacattttcacgttgattgacaatgaaccatcaatccgtctcttccaccgccgttttgcgcgataatctctaccctgcgaccggctcttcttctgctccggcaggacctagagcggccgcagggctcaacgtcaaccactcggtctcgcttttcgacctcgcacgtgttgctgtggagcaatacgatcagaagaatcgatccaacagcgagactgaagatgagaacgtcttggcgctagccaggctcggaggacatggagggcacgtctgggtctataaggatgcctaccagcatctcggtgcggcggggcaagaccaaacctcggctgctttcctggcggcctcacatcggcagtggttttgaggtcggcaaggataaaatgcctcctgtgagtcgtggcgggaaagatattcctcattcggctcggctcgtttgaccataggctgatctgattacaacttgcctgtactgcttttttgacttttacctaccaggacattgtcgggaggtcgtcagcgtgggtgacaaacgcgctggcgcagtatccccctttcccccatcaccttcattcctccctctcgcctgctctatcaaccccgcccatctctctctcgggctcatcttacgcctccacttcatccttcgcttcgactcaacatgaagcatctcaatcatccaacggttcgtatggagcagcgaggatcaacgtctccacgagtcccgctagccgtccgaacaatcttgggacatctcccggatccccaatgtctcatgggtcctcccatggcaacaaattcaatcatgcgcatccatcactggcagccatgatggcgagcaccaacctagccgtctcagcacccagtaccgcctctgaacacatcaacgcgggaaatcacccgcagctggtcaacttcatctcagccctgttcccgtatcacgccactcgagccctttccatcgcccatctactcgagatcgtcatcccgcacgctcccctcatctcaggagccatgatcgacttgcctcctagcccgattgctacccgtggcaatcgacccaagttcgaagccggtcggaccgtctatctccatctcccgcctctacatcccacttcgcactcgtcgagccattcgcacggcgatccggacacgcatcacaatgtagacattcgagaccatcttacgtccctgctcgacctcgtttctgaatcgctcgaggcaagcgaattggtcctcgtactcaaacgcgacgaacgccaggatgaggaattgagagaactccttcacgcgctcgcctatgtcggtggcggggttctcaggcgggtcaagggcggctttgactttgacgagagaagctgggtcttggtcgggatcgaagtctagtcgagctcggggccaaccaataacaacaataacatcgtactgtccaagctaatgaccccttaatttgtactgaccggaaactcaacctagccccgttgtaatattctttctcattccgtcgagcaatttcaagtccatgactttacaacgatcgtgatacgcaagcttcgccatcggcttatcagtcctcgtcgtctcgcttgcgctgcaacgatcaagaggggtcaatcgtaatcagcgacctgcaatactgcgaaagacggagtgacatggccatgcctaccttcatctctcttgtgatacgctgacgagcagcaggatggtgtgccaactctgatgacactgtcgagatgggacttttggagatttctatatgatatagacaacgcttcaatactgacatgcatgacatcgcctggaatcgttcggcttaccttgcttgagatcgtacatcgtctcttcgtcctcgttgcccaaaaacgtgatggcgatacctgtctttccggcacgaccggtacgaccgatacgatggacatacttttcgattgtcgatgccatctgccagttgatgacgcaggtgacatcgggcacatcgataccacgtccagcctgaagagggaaaaagcagacacacacacacacgttcagttgcagtcgtaacgtgacgaaaatgatgcttgactgaccaaatcggtggcgaccaagacttccacatcaccatctctcaaagactgcaaggcagcctcacgctgttcctggttcttaccggaatgtagcgtaacaccgcgacgctgtgagagaagagcaggagagccggtcagcaacgcgccacataatctcatcgacgaaagtacacttacaccggcttgttgcacgtatttgacaaccatatccgcggtcttcttttgattgacaaagacgatcataggaggtggcaagccgatggtcctcaagatttcctgcagcttgagctttcgcttctcgtctccctggacaaactcgacgcgctgctcgaccgtctcgacagcttcaccagcgtttccgatgatgacagtggccggctttctcaggtactttcgagcgagtctttcgacgatgggaggcattgttgccgagaatagtgtggtcacacgaagacccttccatccggtctgaggttcgttcttgtcgatagccgggtttgggtccacgtaatcatccacatccatgtcctctggtttttcgtaatccgcaggcatcgagttcagaatataggtcaattcttcttcaaaaccgagatcgaccattcggtcggcttcgtccatgacgacataacgacactggctgaggaccatgatgttacggtcgatgatatcctttagacgaccgggcgtggcgatgacaatctcggctccgtcccgcagattaaattgttgctcctcgacagcctttccaccgacgatcgaaaccgtcttgtagcccatgggtccggcgaacctcttggtctcgctttcaatctgttgtgccaattcacgtgtgggggccatgatgagcgcatatggaccgagatgcatattgtcctcgttgagtggagcaaggtgggagatgtattccagcatgggaatgacgaaactggccgtcttacccgaaccggtctgagcgataccgataagatctcgattcttgagaccgatcgggatcgcttgtcgctgaataggactgggttctttgtacccgatctcgtcgataatgttgaggatcgactcgggaataccggattctcgccaggatcgcataggatgaggaatgttccctccccgtgccgagatggaaaagtcttctcggaagattcgccaatcacggtccttcatctcgaccaaaggtttctccgtccaatgtcgatcgtcatgcccatgtttggcggctcgacgacgctcaaacgtatcggcgtgattgtcttccagagccttgctcgtggcctttgatcgaccaccttcgtcataacccgccagtcgacctccgaacatggtcccgacgccgacaccgaccgccctgcctccattcgccatctcgtctctccacgtgccgacttcggcggaagaagtatcttcgctcgcgtcccagtcaaagacgaactttttgtcctggagtttcctcgctcgcggtttctttgctgcgggtccggcctcgccagcgggtgcggcaccgagatatcgttgacggatgatggcgagttcggcgtctgtaggaggtgcggccgacgatccgatcgaaggcatcccatcggtcggttggtcaaacgtgcgggaaggcgaggcggtgacggtagggttgtcctggttgggaggtccaggcatcgagttggttccgtttcttggtccagtaggtatcggcgtcgactgatagttgtccccgttcctaccgctgtgtccgttaccagtaccgctcaagggcgacggattataaccgcctcctcgaggtccattgggaggcgggccacccgcacctcttggtccattgggtccaccgggtccaccgagtccccgatcgtaagccctctggttataagcttgtcctctgttcccagcctgatacgattgttgaccatatcttccaccttgagctccacctccgcctgctccgaagcggtacgaatcgtttcgcctcctctcctcttcagccgctcgttccaacctatcccgatccgctcgctccgaggcctgcttgtcctgcgacgcagcaatctcctgttgacgtttttcgagagcaatttgagctctttgcgcctttgtcaggaacttgggctatgcagaacgagctgtagggttagtaacagatgctcggaaacgaaacgagatgggctggcactctaccttggacgcctcttccttttctgccttctgtttggcgaggatgtcctcgactgacaagggggtcttgccaatagccatgatgagcgaggagttatctcgacgtatgaatctactgttcgtaaccgagctggctagtgagccagtgaggactagattgcagactctaggaggcataagcaagtctatacatgatcaatacatgttgcgaggtatacgaccttgacctcgaccttgagcttggactcttcgttgaccattctagatgacgaacctccccgctaagttgacattcataagtcacatcatatatgatcgaacgattcatacttctcgaacaatcacaaaggccgtgccataacactcgcttgaatccgactcgtcgctgtttataagaaactggcttgatatcctaagacgagaaagtcggtgtccgcgacagcgccgagatcccaacgcactcgctcgtcatggccgaagctagcgatcgacttgagccgttcctgctcatggctcgatcgactaaaggagcggccgctgtcaagattatcgagagtgctaccgcagccgtacgtcacaatctataacctattctcatcctacttcgtctgactagcccggcgtattcgatcatgaagcctggagtatatgggtttggcgaactgctcgacgttcccaatatcaaacaggtgggtgtgactaaagcgagactggtaaaaaatgatcgctgactgggacagatcctcttctgtgcaatcatagcttcaagactcgccagaacactcttccagctaccgattgctccaactcttcgcctacggaacactagctgattaccaaggtcggttcgccttccatccgcttcccagccgtcgatcggctgaaactgatctcgaactctcatgcccaatcggcatttagcgaaccagtcggcgggactcccctctcttaacgatgcccacatccaaaagctcaaacatctcaccctagtctccctctgtctcgaatctcgagtgagtatgaacggctcataatcgccggtccgaaccagctgacattggccctgatccagacgttaccatatgaccacttgcttcgcacgctcgaagtcgcgtctgtccgagacctggaagacctgatcatcgatgctatgtacaacaacgtactaggtggcaagctcaaccaggagagcgggacattgagcgtcgactgggtgatcgggagggacgtcgcgaggacgggcccgagcatgcaagaggtgcaacgcaagttgacggcatggcaagtcattgcaatgcgaaattcgcgcggcggtatggtttcaaaaagctgaccgatgtccgttactgcaggtgcgacaacgctcagacgatcctcacctcgattgatcagcagatcacgaccgccaagacggaatcgatgcaaacccgtcagaagaatgccgagtatctcgaagaacgcaacaaggcatacaatgccaaactcgccggccttgaagagaagggtggaagctcgaatgccggctcaaagagcatacccggtcaaatgggtctaggttacaatcctcccgctccgttcatgcgatccaccggattcgacacccccatgaccgatcaaggagacgatgcgttagcttacaagggcagaaagtcagtatccatagcctccgcgaaattatgattggcggttccaacgatcgatcgagcgagctgatcaccttccacccttcttgcgttttcaccgaccgtcggaacccattctctcccctcatttctggttagggcgcctcaagaagaagtgccgatgaagagacagaagaatactcagaccccgacctcgaatgatgcctgatgccaaggctatcgatcggagtagcacgggagccgagggatgagagaacgcttcagaccattcacgaccatttttacgatcaacgggtcgacgggcaggtccgcttgtcggcagcgttttgtatagattgaaccaaatgtattcgatcgatattcgaccgcaagcctcagcttacgaaataccccctagcgcaattcctggtcggccaggcagctgtcgtcaaaggttcacaagcgtcgtggtcgttttgttcatcagcattcgggtcttgaccttcccctatcccgacccttggctagcccccgcgccatgtcaatctcgctgcaacgtagcgagaaggagaatgcccataaacaagcgagttggccacgagatgtgagatgcctcctctaccttgccgctactcacctcgtcagtcgtctttcgtttcacacctctagcagacgttacgagaggtgtgggtctagtgctggtgatcaccaatgagaaaaatgtcaggctatttaccccccggcctttgttcggacaagcttggaacgatcagcgacgatgccaaacgcgccctctttcctcacgtcgatgccttgcccttctcgaaaaacaagccttccgtgacggacggaaggcaaggcaattatgacatgcagctaagggatccaaggcacactacccgattacaatgaggtgaagcataatttatacatttgacttgggcgagaagaaaagagcaacccatgcaacgacactagtcctcgtactgtagttgaaaggaaaaacatcccactcagtaaacgggacagccgccatggcctgaaagcactcaccttgtcgagattcagggtcaaacttcgcgagctgttgaccgcctgatctcggtagatacccacgagcccttgcgagcgttcatacctagcaccatcatcccgagattagtttgctaccaccaggagctggaggacaagttggttacgcacagagatcccttcaagctgatgacaatgaactggaaagttggcgacgagtgggtcctgatgtaatccgcgatccttccaacgttagtattgtccagcgcagcgtctacttcgtccaagacaaagaatggtgacggctgatacgtatggatggcaaagaggagcgccaacgctgccattgtcttttcgcctccggaaagttgttccatatccctgaaacgcttcatgggcggcatggcgtggtatttgataccgctcaagtaaggttcctggtgcagaaagagatgagcgtccaaacacaggactgaaaagcgaaacgcgaaagctatactaacttcgctgtcttccagcgataggtatgctacgcctccggctggtgcattgttccccttcgttagatctttgtatacagtatcaatcttttctgcgatgtggttgaaggctttgttgaagagatcgcatctgccagaatgcgctaccggcatgagcgggtgacctcgagattggatcaaggatagagacgaaccgtttcttcttgagagctacaaagatgtctctggctcgcttctgttccttctttgcgtcctcgctgtccctctcggtatttctcaacttcgcttcaacgtccgtgagcctgtcgccaaatgagaatgagctcgtgccgaccttcgctcttgctccgcataactaacttctctatcgccttgagattcggcgccatcttttcaatgtcagcaacgagcgcggcaatgcgctgctcaaaatcatgaccgcgttccggatttccgttctgagatgagggtgcagaagcgattgatttgtaaggcaaagaagacaggcacatttgtcaccgggatctcacctcgcgatcatcatcctcaagctgttcgaagtctacgataattccatagtcatccacgtcatcgtttgataaatcctgcattcatgatctcctcgagggtaagcgatatgcgctaggcagatgggcacgcgacgactgacttcatcgagaggtacatcctctagcgacccagattcgagcggcaggtcgatatcctccactttgcaccggcgatagatcgagaatcgctcagaagattgtcttcgaatttcgtcgttctgttgtggatgtcgaaaggataaagatgcggttggccatgacttcaagaacctggactgacccattcgttgatatccttctgaacttcgtcaagagccttcactgccttcgacagttctttccgagcggcttctgacgcggtagtcgcagcctccatatcctttttcatagcattcagcctgcctcggtgcttatcgacctctcgctctgccaccgcgatttcctcgcggagagcttccaattcgatctcgagagtatccgaaatattagtggtctccctctcaaccgtggcacgcagtttcgccagtcgttcgcgagttcctgccagctgagcttcctcgaatttgattcttgatcgagacgaattcgattgcccggtcaggcccggatcgcaataagaacaactaaagcagtaaagttgtatacgcactggtgattcagacgcgctatctgggcatcaaagcgcgctcttgcctcggattcctcttccgccgctcggagttgcaccgtctcgtagttcctgacactctcaattccgagccgttcgcaaaactccccaaagacttcgtcatcagcttcgttgacagacgactccaggtcctgcatttgctgttgatgctgttgtatacgtttttcggcctactcggagagaagccatcagctcagggcgctatcgcaagcgtcagtcttgaattcaccttggcgttgtctgatcgctgcttctttatgtcctggtcggtctgcttgagctcgccctttgtaccttgtaagcgttgacgagcgcctgtctgtttgcaaaccaatcgttagagcaagcagcaagagacttcgtctttcgactaaccaaatcttcgcgggcgatgcgcaaggcggtctccaacgcttgcagatccctagagatctggtcaatggtatccttgttgggtttccctttaacgaggtcaccgagtgatttgtagtgtgcatctctaagttgctcaagatctagcaaagcagactgtcagcgaagtggccactcggaaatgacacagaaaatatgagttacctcgaaccttccgctcatcccactgttggtcttcagcctgctctacaccccctccagtgatgagaccgctcttatgcaagatcgtaccgtcaattgtgaccgctgatgccgagatgtctgtcagtcgagccggtaaagatcttcacgaactgggcgcacctttgacttcgatacccttgttgtagcagatgtctcgcgcgatttccatggtatcgcaaacgagcgcactgccacaagcatgttgcatagctcgttccaacaacggatcgtactgaatcacgtcgatagcgagcctcgctcctcgcaagctgcgtagacgatcctggacctgtttgacttggatcgtgtcgagcggaatgaaggtggcctggccgcttcgattttgtctcagatactgcgttaggaaaggcgtagtcagatatctttcctggcaggctccatcgacagatcgccccacctcaatacagcgtatagcagtctgctggtgatcgacgacgatcgcatcagtgtttcgacctagaacgatcttgacagcggtgttgtatcggcgttcagagggtcgacacagatcatatactcgaccatgtacacctagtgggatcgtgggtcaatagagtctaatgtgtcgtatgggttgcgacgtaccgctgaagaccttcttaagcttgttgatgttgtctttgagtcgcagagctcgatctgattccgatttagtagccctgaactgcaacagctgctgcaaagtttcgtggagtttctcgttgatctccgtctcgagttgcctgtatatacagtttcagcgcctggatgctgaggatggcaaccgcgcctacatacgagacacgccgcgtctcgctcgcgagctcatctgattcggttttcttgccttgcacttgtgtttccaaatcgttgacattggattgagcctggtcgacgccgcgattcatcactacttcagtataccggacctaccgccggaaacagatcttagcccttcttactcacagaatcgacgcgctcttgcaatactgccgcctcctgggtcaacttctccttcttggccgtcaaaccagcaagcttttcttcgccagtcgtcaggttgtcgcgcaatccacgagcttcccttttctttgcatcgagtgctttccgctcgtctgtcgccttcgcgttcgcggtgacccgactacgaagccggatcaggttcgaggtcagttgatgaaacctctaggaaaggcatatgggcttacagctttcggtattcttccagatcagctggactaaacgcagcccctcgggcttctgcggtttcccgctgtctttctgtgtccgtgacgcagacattaagcgatcgtcggcgaatacaccgtgtcagtgcacgtaccggcagcagcttcggcagcttcctcggcatctctcaggtcccgcttgagattgacaacggtcgtggcttgccgtgcttcgtccttctccacactagcaatcaacttttttgtagactcgatcttgcgattagcgtgttcgatctgggtctcgatagtgagcaagccgggtttctattggataaaagaggcaatcagtgctagtatccatacgcacagattctgcgggataacaaactttgtcgtcaagcgccttttcggccgtctttaagattccctcttgtttcttgacagcgaggttggctttcgcttgaacgtccttggctttcttcaccttcttctcctcggcggtctgtcatccgcgtatcagtatttcagagaggcacgtacagtgcatacagcgcggactcacttgcacagcttttaaatcatcgattttggtttcagcctcctcgatattcttctcgcaactctcgatttcttcctggatatggaacagcctccacagcatgtactcggctacgagctcttcctgcagaacgataaatcttcaacatccaatttgcccaagctcgtgtagaagacacgtcctcacctgatcttctttcatcttctcccatttggcgatctcctccttctgctctcgataatgcttgacttcgccgaaaatgcttcgcttcttggtatagttgacggtcgaggtttccgtcgctttctcagaggccaccttcgccttttcgtactcggcagcaaggtcgagtgagctaagggaaggccgtgtcagtaatagctccaccgcagagcgaacaacatcaaactcacccgctgatctggtcgatcaactttgacagctctttcgggctttgtgatgcgactgcctcaacgtctccctggaaaaccaagaagttcttggccttgaccaagatgttgtgtttttccagagactgattgtagagtagatacgtcacgttcctgccgttcagggaatacgtggattgaccgttcgaagcaatcctgttcatgtcaagtggacacgacctgtcgtcagacctttactgacgacgaggctggacaaagagctcgggaacttacgaccgcttgtacttgtactccttcccttcggggtcctcgtacacggccatcacccaagcggaagaagcgtcgtctttgccaggagctatcgcctgggcagcatcttcctcttcgtcttcgctgtcttcctcctcttcgtcatcttcttcgtctgtcgaagcatctgagtcatcctcccgcgtctttctcttgccaagagccgcccttgtccctttccctttggctttggtcgtccgctttccctttgttttgcctctaccattcgaaggtcctccagcagagccgccagcctgtcctccttcaccatcctcgtcatcgggtccggccgctgcttttctgccacggtagatcaagtccttcaacatcgtactcctcagttgacttgacttgacccccagtacgaatgatatggcgtccatgaggttggatttccctgatccattgggtccgatgatgcaagcgaattggtgggtaccaaaatcgatcacttgttcacctcgatacgacttgaagtcgcaaagctccaatcgacgaagcggcatgatggcagactctttcccacttagagtagctaagttgatatagagatgctactgcaaatttttaaaggtagagctggaggtgaacgctgactttagtgacgaagtaccacaattgaggttgttgtgttttggaatgaggatgtctggattcccggatcgaggcagcggatgatcggattcgacgcgatttcatcttaaattgctctcgcgtcgcgtcagcgcgttcgagacaccttgggagctagcgagccgttggtcagcagtagtatcagacaaagctagtgggatatatacaggggcatggaatacgatatacaagattaattgctgcaggcacgttcagacttctaccacttggagccagccagctctcgctcgagcgcagaagcaggatcctcttccctatccggggcatcgttttgttgaccttgcgcagacgtgtcgaaaccgggacccactccagcttcgacaccacccgtgacggcggcagctggagcaggaggcatactacggtacaggcaaaatgtcagtgctaaatttggtgtcgaccgaaacgatacgcatcgcttacgagtcttttcgaggaggctgaggtttggcctgctcctgcttttgctgatagtgagccgcggcttcctggcgaacctgattcctgaaggcggcgacctcttgtatgatcatcttcttcatgccttcggtcgattcttccgcctcaaaggcaaagtcaaatgtctacaacaggcaaacgcgtatatagatcagatcgccgacacgtaagcgtagatccgacgctactcacatcagcgcaaaggggttcgtcctgaggatcatgccagacgctcaggctgatcaaaagtcgcattagcatcgtgttattttataggcagtggtcgatctatctcactaagggtgctccaatgcttcttcgcagctgattcgcttggccggatcgaatgccaagagcttgcccagcaagtcaagcgccaggggattggcttgagggaaaagctgcttgaaaggaattctaggcttgataggtagcgatcgaatgtagctatcggaacggaatctatgagcaggtttcgacatggctctggtgcaggactactcactcttgcgctcgtggactccctacacgccttagagtgtcctccgtcggtgtcccgagcagattcaggatctgattcaattggtcgacatagtcgcgccccttgaagatgggtctgcctcccaagagctcggccagaatgcagccgacggaccacatgtcgatgctagcggtgtagttggcaaaactcaacatgatctcaggcgctcggtaccatcgagtggcaacatattccgtcatcaagccggcctgacccgtctcagcgcttcctcccgcttggaaacctcttgccagaccgaaatcgcagatctatatcgataaactgaacgttgtcagatatgcctaggcaacgcgtcggtgacttgacgaccaaccttgagttcacagtctgcgttgacgagtaggttaccgggcttcaggtctcggtgcaagacattggcagagtgaatgtactgaaaaaagcatgcagcaatagcctgttagctgcagggccgtcaacggacagatcgaggcttggtgtaccttcaggccacaaagagtttggtacagaaatgattggaaatgggcatctgatagaggttgtccggaacgaatctgacatcgtaaaaagcccagtccgcatcagtcgaagcttctcagattgcccaattggattgcggactcacgattgcgtgcaagtctgcctccataagctcttcgtacaggtagacctcgttgaacgtccaagtgcctggtgggtctggaacgatatccatgtcatacaggcaggtgatctaagggtcccaagcgttcctcatcagattccgacccttcagtgagatgaggagacctggttgtggctcacgttcttgtggccccggaaatgtcgcaacaatttgatctctctcaaacacctctttgccaggattttcttgctgaagatgttcgtgatctgtgtaaaggtggaagggccttgagctcgatagacgccatgcgaatgtccagcgcgatctagaacggaccttcttcacggcgcacatctcacccgtcgcctcatgccgagctgagatgacacatccataggccccttgacctaactccttgacgaaagagtacggctgagcgatggtgctgcagagtcaagcatcctcgtgagcgttcaagcgcttagtacatctcgtccttccggcagatacgcactagacattgttgagagcctgaaaagaatgcctaggagcgttgtccatgttgagatatcgctggcgcggtggataacagtcgatgagatggatggtttagctgattttagtgatcgacaccagatgttttcagtggttccagcgatagttgagtggtgaattggtacactggtacagggtgactatataccggacgcaaggttacgtgtgattgtgacgtctgtcgaacctgtcgaattccaagcggtggcttgcggtcgaccgtgctgtgcaatgctgtgtcgcttaagtgttgcgctgttgtggccgggacgtatctggctgattttctgcgggtcctcaaaatccagatagtcttatatgattgttgctgagatactgctggacccctttgtgactgtcccttgtacggtgattgtggttgacggagtgttcacaaaggtatgaacagcaacggactacctttcgcggctttgggttggcgttttcgagcggcgaacgctccctttcagctaggaatttgggagaatatgcttgtaatgggatccctgagtggtactagtgatcagacctcgggcgtgccagatggagagctctttctatcccggaaggcatcctcaagtcaggtcgaccttgggcgagctagcatgagaacggcacttgctccctcctctcgaccacgactcatagtcgaatcaatttgcttccgggaacgcttcctagcgagagttacgtcaggtcgggcgagccgatggcttccaccaactaccattctcggatatgacagggtgttgctgttctgcaaagtacatggggaccagatcattagactcggctcttacttgaatttgattcttgagaccgtagaccagattcggactgtcagccgagaccagcagaagcacgacgaatatcattgttcgtgcacagcaaggtcagatcacgtgacacttcgaggctggaacatttgcttccgatgcacctccatactaaagttcgacaatccagtcagttagctcagaatgccgctcaatggctcatatattcagcccaacccgtaagcgtgatcgaacaccaaatacaaaagcttcttgcgatcgattaccatatcaaagtcgccggcccatcttgcaagatgtctggctcttcgaaatcattcgtcctgtcttccttgatagctcagcgaaagcagaagaagccgctaaagtccagcttgaaggctcccgccagtggctcgaacggcaagactgcagcatcttcgtcaactcctcgagcgaaggcgaacaaggtccgcgcagaagaattggattggaagaagctttccaccgacagctacgaaggtggaactttcgatggagatgagggcggtatgctactgctcgaagaggtagatggggtggatgttcaatgggaagaggatgaggcgggaaggaaaaaggccatcctgatggtatgcacatgcgaacacattcgaatggagcggctctgatgtcgcccctcccttctcccttcctctttccccatcaaagtcgagcaaggccgctcctctcagcaaacgacaagctcaaaagaggaagcgagccgaagtagatgttatcagagagggctctaccgacggcgagagcggggacaatgccgagctgagcgatgcagacgagcaaacgatagacgctactggctcggctttcgaatctgcatttccgccatcggatgacgagggtatggaatcggatggagcggaatcagatatcgaagtcaagcaagaagacaacgaggacgagtcggtcgagcaggacatcaagccggatgtcaaggcagtttcttcgaccaagaaagcgaaggctgctgtcacggaaacagtcccccagcctccatctctgtacgatcgtatcaaggatatcaccttcgacgaggatctgcttccaggctggaaagaccagaagctgcaccctttgctcaagaagtcgctatttgcgctcgggttctcgcgaccgagcgatatccagtcgaaagccgtacctgtgggtcttcaagcgggccgggacgtcgtcggtgtcgccgaaactgtaagtgcaactgccgtactgacgcgtcgattacaaagctgaatcgatccctttctacaatcagggttctggtaaaacgctagcatattcgctgccaatcctgaatactctcttggagtccctggccgcaaccaagccggatttgcgaaacaccaaggcgggcaagcgagagctttccgccctgatattgtgtcccacgcgagaattggctctacaggtcggcaaagtcgttggcagcgttgtcgaggcgggacttaatgctgtcgatgaggtcaaggaggagaccgacgacgaggcagaggctttggccaaggaagcagaggcggaagctcgatggaaaaagaagggcaagggcaagaagaacgctaacaagaaaccggaacagccagccaagaaggcggtcaaagttgccccggctggcccgaagccgcctcctatcgtctctgtagcaacggtagtgggaggattgtcagcggtgaagcagaagcgtttggtggcaagaggttgtgatatcctcgtggcaactcctggtcgactatgggatctgtgtgaagaggtaggtgcaagacaatccttccagactgggcttcatgcctgaacgaatcaaaatcagctcgtgtactgactttcattgagcaataggacgacactttcgccagtcaaatcaagagaatcaaatacctcgtcatcgatgaagccgatcgaatgatcgagactggccactttgccgagctagaaaacattgtggctttgaccgtccgaaccaaggagatgtaagcgcaattttatcgtcccgcgcacagaccaacaagccccttatactgttctctatcgcaggcaaacgaccaacgcgtctgtcgatgacccaacctttgcccggaccaacacgaaagcagacaccactgctgtgcgagccgacatcaagacgtttgtcttttcggcaacgctgtcgaaagacttgcaaggcaacctcaagcgaggtagctggcgcaagagtaaaaaggctggcaactcgggcaacactctggacgatctgatcacgaaactggatttcagagatcccaagccagaagtcattgacatctcgccagaaggccgtttggtcgccactctgcgagagagtatggtcgagtgtatgacgcttgagaaggtacgtcgtgtctgtggtggggctcttaaggtctagctgacgcgtgcctcgcgggaataggatctctacctgtactacttccttctgcggtatcccggacggtcgctcgtcttcgttgggagtatcgatgggatccgccggctgattccgctcttcgagatgctcaagatgcccgtgtatcccctgcactcgcaactgcaacaaaaacagcgactgaagaatttggaccggtaagctgacagtttgttctttcttttggactcgctagcaaatgaaaagactcaccatcaatcttgaaacagcttcgcgtcatcgccaaacggaatcctcatcgcgacagacgtggcagcacgaggtttggacattccttcagtagaccacgtcatccacttccagctaccgcgcacagccgacgcatacatccaccgaagcggtcgtaccgcaagagcaaagcaagatgggttcagtttgcagatggtcagcccggaggagaggggtgtacagaaggccttgatgaagagtctaggaaggagtcagtccggcactccctcttgccataggggaacacaactgacacgtctctatcacgtacagcaccggaattgccggaactcgccatcgagcctggattcttacccaagctcaaggagagaattcgaatcgctagggagatcgagaaagctcaacatcaaatcaagaaggagaaccacgacaagagctggttgaaggaggtcgcggaagctatggatgtggatatcgacgcagacatgctgtgagcggattagcaatcgcgagtgcgatacttgatagcttacatcaaatcttcttttcactcgtattaccgcagttccgaccttgaagagaatgaagccgactcgagatcatctgccaaaaacaagaggccttcggacaccaagcttttcaacctcaagggcgagttgaacgaattgctacgacagccactaatggctagaggagtctcggcgaaatacccgacatccggtagcaggactgtaatcgatgatcttctacgagacgacagtgagtctgacgggatcgaatcatgccagtgggaggtggttgatcgtcaagcacttctcacagatcaccctgtcatgctcggtgcctcgacggccaaggcgttcgaggatgtcgattcgagaccggcaaagaaggcaaggaaatttatcaacaagcgagcacgggcttgagtacctatgtaaaaacatgtcaagcattgagtatcaatcacgtagcagctagattccggattcgtgaacatctacattccagcgatcagtagccttatcgtgcggcgtcgtttctcgacaaacgcccactaccagctactagccggtatccaaagtcgggttgagcctcgaggcgtctacaaggagctcagcgatttgagccttgtttgcatgcgcgtcgcctagaatgtcaaccattcttcgaggagttgcaggccgatatgagaaacgagggactggacatgacgactgatactcctactgaccttgacgctttggctgatcatttcgaatcgatctaccaaacccagtagccgatatctagcaattgagttgaactaattgacgtatacccaccaagaggatggactcggatacactaaaagctgctgttgctgtgatcagcgcggccgtgactgccaacaacgatgaggtaattacaacgagtcggacgatggcgaggatacggctctgagcctgctcgtcgttcctataggacataatcgcgaaactgaaagaagtgaacgatggaccatcccctacagagggtgtattgagagtaagctgcgtcttgaggttccaccggcgaagcgcaagctgattgacgccgggatcccaggaaaccaaagccggtgctaccatcaatcgattgaagaagaacaagtcgaaagagattcagaaccttgccaacgagatcattgcaaagtggaaagctgctgttgaccaggagaagaagaagaagagacctgctgacgatacccccgactcgaccgcggagaagaaggtcaagaccgagggtgtcaaaagcgagcgcaaggaaggagcttcgggaaaggtcaaggccgagtcagcaggtgagtttcatgcctgtcgttaagtcagatcagtcgtggtcactgactcgacatctcagctgcgtctgcccgatcatcgcccgcacccgagcgaccggtaaagcgtgaacgaaaatactccaccatcgacgagcatggcgacaaggacaggagtgccgagaaggatgcgcccaagggattggaacctctcggggttgataacatgccggacaaggagcgtcctatccgggagaagggcgtaacgatgtgctacgacgctttggcgttcgataatctgtcgggtacgtactgccgcgagtgatcacccatatctaccgtcgtcccatgctgacctttctgactcgagtagagtccagcttgatcgtatcgcgagccattgccatcgaatactccatctttgaaaaggtcgaccggacgactggaaacgactaccggtcccgtacgtacaggaggcaattgctagcgacctctcgagcccacactcagagataatcctacaggtttacgggaaatgtatctgcatctccgcgaagcaaacgcagcattgcgagatgcaatcgtccggggagaaacaatacaggcaaaggatgtgatcaacctctctcgagatgtaagaacaaatcgtctgaccaatagaccaggcctcggctgacgcgcgatcgttcggaacgagcaggagctcgcaaacgagactatcaaggccgaaaccgctgcgatcgagaaggccaacttgttcgctgcccagggcgcaggggagaccgaggtgcgcaatcgccgcacgagtatcgtgggaaatcccagctgacgactttatgacaatttttacaaggccgagacgttcgccttcaagtgcggtaaatgtgggcagaaccgtacaagatactatcagatgcagaccaggagtgcggatgagccgatgaccgtgagtggcaccgctcctcctgaagtatgaatctcgctgattacacctgagttttgtagacattcgtaacgtacgcaatgtgtcgactgtgtttgcacctgcctatccaactgacaacccactgtttcttccccgtttccaggtgcatcaactgcagcaacaagtcagtgcctgggccgtacgggatgtcactcacgcgtcgaagctaacgatgcgcaactgattgcaggtggaaattctcgtagatcccgattgatcgccaaaagaatccagttgtatcatgagcagcaatattgctccatcctggctcccccattatacatcatcgcatgtgacagaaccagttacatctatgcgctgccctgtttggcccgcttgataaagtctataattttctgcgcatccttgccttgtccatccgatcgttccgtgccactgctcacgtccacgcaccacggctggacggcctcaacggcgccggcaacggtctctggggttaagcctcctgccagcacgatgggcagccggaatccaccgccagtcccgacctcgcccttggctacggtccgggcggcaacggaccaatcgaattgcaaaccctcacctccgccggcggaaccggacttgccagcagcgtcgagcaagatcaagtcgttgagacctggtctgtcgacctgaccaccccgaatcacattttgatcggtcactcggaaagccttgatgacaggtaccgggatctgtcgagcccattcctgaggttcatcgccgtgtaactggacgacgtcgagtggtgtcgactgaactgccgacaggatatacgagaggggctggttctggaagactccgaccaacagaggcttccgcgatcggctgagcatctgggctcggctagtgaaccaaggcaaaggtgcaaggggatcatcgaccgtagccacgacgtccaactcttgctcatcctcgggatatcgaatcgagcggaggtagctcgaaatctttttagcgacgggcaaagcgatctttctccgtgtgggcgcaaagatgattccgataaagtcggcgcctgcatcagcagccatcttggcgtcttcaaacgactgtaccccacaaatcttgacgagcggtgcggtaggtttgatgggtgccggggtaggtacggccaagaggtcgtggatgaacgccttggggtcagcggctcgcatgagcgactcgccaatgaggacggccttgactccctcgctgatgtaccgttcgacatcgctccttcccgtaatcccgctcaacgcacacagaatgacatcctctcgtccccgctcacgaagcacgtctgccagcctactcgtcgtctgcatgtcgaccttgaaatcgtgcaagtttcggttgttgacaccgacgaccttggcgccgaggtcgagcgcgatgttgagctcttcggcattgttgacctcgaccaagggttccataccgagcgagaccgaataatcgtacaggtcgcgcagctcgtccacgctcagcatggccacgatgagcaagatcgtatcggctccgtgcatcctggcctcgtcgacctgatacttgtcgatgatgaaatccttgcggagcagggcaggtcggttgggcagcgagtcgagggcctgcctcacgctgagcaggtcggagagtgcacccttgaaccaggtaggctcggtcaagaccgagatgacggacgctccggcgagcgcatacttgatggcctgggacggcgcgttggcgtcgatcgcaatgtcgcccttgcttggcgaagctcgcttgatctcggccatgacggcagggtgatcaggcaatgtctgactgattcgagcgacgaggggtacgacaggaggcgcagcgtgcaaagcgatcgatgtcttgaggatcgaagtcgaggtcgaaggccgagcggcggcatcctggacgtcttgcagacgttgtcgatggatcttgttcaagatcgtagggacggccgcgggatcggctttggtctcggtcgaactggatccagcctctgcctgaacgccggcctggacgagcccctcggtgacgggtagggtttcgaccttttcctcgtgtacggcttcgaccccacaccaagcgttcttaccaccccacttgcctccctcgagtttcaaaaagttgcccatcaactctcggccaccttcgctcatgaccgattcgggatgatactggacggcttcgatagtgtactccttgtgtctgacgcccataacgacacctgattcgctcgtcgtcgaggtaatggtcaggcaggatgggatcgtcttgatattggcagcaagcgagtgataccgggtcgaagggatgttttgggggatgccgtggaaacaccccttggcgtcgtgcttgacgagcgaggtcttgccatggaggatctctccagcgtgcgcaatctgtggaagagaccgggtgaaagaggaggtgagcaaagggtatgaaatttcggtcggattaaacaaaggtatgaccactcacatcacctccgagcaggtcaacgatgcactcgagacccatacagaccccgaggacgggcactttgcccatcgcccaggtaatgatgtccctacagattcccgagtcggtccgagggtgtccgggtccgggcgaaataacgatcgacctcagctgtctggccttgtacatttcctgcaataaccagcgcgcgttaaatcgatgtcagctagccaattccgatcacctcgagcacgttcactcgcctcgacttcagggatcgtgatttcatcgttcctcttgaccaacatctcggctccgagttgacaaaagtactggtacaggttgaaggtgaacgagtcgtagttgtcgatcatgaggcatagcgtaggttcccgttccgattcgacgtcattctgagcgatgaccttttctgaagaggggatcgtgtggttctgcgggatttcttctggcgggatcgacatgttgcttgaaacgttctgtttggattacagttcgatcgagcagtgcgtgtttgggatcggagttctgaagcttcttgtaagcttgtaaagatgcttgagcatgatcacaagtgatcggtgactcgaataaagttggtcacgaattctctttgaaaacgcatagaattttctatatttatgcgttttcgatcaacttttcgacttttagcggacatatccgagactgtgactggcatgactgggcagggtcctccgatcgacgtctttgatgtgcaagacgatatggtgcgttcccatcctggcctgtgtacgcttgacctgtcacaagacaccgtcgtgttgctcttgtgatgcctaccatatggccagccacacgccgtgtatacgttcatacgaggcacgatccggtcgtttgctgcattgagtgtaaagccgtcaaacccatgatttgcacctcactgctaggtatctatcgaagcgatctgctgggagatcactggtccatcacgttatcacacacgattcgctcgactcctttgttctagtattcgcaataatgagtgcgggacgtcctttctcgagagtgcccattgctataagagtccacacgtcgcctggcgcggacgggttgttggcatcctactttcccctcccttctccttttgtgtacatctctttcgcctgccatcactactgtcgattgaccgaagctcatctatccggatttgacaccaccacagctcttatcttgaaccttaacaagaatgtcatcgtctccctatctgcggaccgtccgtcaagccgatatcctccaagcccctgtgaccgacctgttgtccaacgtacttcaatcccccaatgaccaaaccggacccgcatctctacgaccatggtccatcccgctccatctcgctcgagacgatatgcgagccggtctgaccccgatcggatggttgagaccggacgtcagggggttcctcgagtatcactggcccgagcaagatctgggcgagatgatgatcgagtttgggatctgccgggagttgcagagacaaggcgccgtcgggaattgtcaccaggacggaccggaattcgcctttatctctcaaagactgttggatcagggatacgaggggatcactagggagatcaatcggttggccgagtacatgagggacaaggggatgtacaacgagtgtctctgcggtcagtttttttcatgacacatgcttcgcgctggctaatcatcaagctgatattcgcacctatcacccttcgtcaaaggttggagggacgagaaatacgagatctatgcgagcccgaaatccagctactttacctcgggcggttctggggtctcttcgtcgggtgccatgtcagtcaacagctagacccacgtcccgcccggatcccgccgcttggcggtgctctagctgaagtcactgtctctgtattcacacagcaaccgtgcgtttgacctcgaaagggctgcctgcgccgtcttcggtctggcgacgtttggcgtacacatgacgggcaagttgcgagtcgaagcagcggtgaacggcggatagcatcttattcagactcgtcggtctcatagcgtatgaaggagaaggagaggatatgaagatctgggtaccaaagaggagtgctaccaaggctacgtgagtgacgatacgtttctcgcgaaagacccagacgagccgctgacaccgcatgcgtaaccacgtatgtacacctgtgcagatggcctagcaaactcgacaatgtgagcaagtattttccttgcaagtggttgcatctttgctcatgaccctttcgacccgcattctcgtacagtcggttgctggtggcatccccgccggaatgtcaccctttgaatcgatgatcaaggaatgcgaggaagaagcttctttgcccgaaagtctgacgaggaaatcggtcaggtgagcccgggcgagatcaaaaaagtgtgggctgggttactggcagacggctatgctgaccttccccccaacgtcctcgtcatccaggcccgcagggttcgtaacttacttttacgtgaccgcagaaggctggtttcaacctggtgagttggcatcatgaagcccggataggttagctcgactgaacgattcgaccgtgcctgtctggttctagaatacgagtcggtcggcgggacatgagtgagatcaaagcgaggaatctatccctgatcaacttccattcggtcgctttatagatacgtctacgacctcaagatgccttccagggattccgcggaatacctgcctctcaaaccgttcgacgacgaggtcgattcgttccaggtgcgtcgcgcttcccgaactcggtcgagatgccacttcctctcccgctcattgcgcccacgttgatgctacagctgctacccgtacgcaaagtgatcgagacgttgaagaccgaccctaccgcgttcaaaccgaactgcggcctgatcattgtcgatttcctcatgcgacacgggatgatcacggtcgaggacgagccggatttcttcgagattggttggagttgtcacaaggatctgagcaggatcgtggcttttcccgtgaggaagcgatgatcaggagtgatggactcgtaggtcggtacgttagatggatggactatttacttgaatgccgatcaacatcggtacgttactttcacaaaccgtagacagcgcccatcgttggcgttttttacgcgattgcgaggacaggccagacgttgtgcttgtccccatgcgcctgcctgctgcctgtctcttctgtttgaccaactctgcattgacgttgttgcatatcgcccctccaactctgtgtgtgtaacgtgcctgtgtgtgtgttttgtttccgcgcgaatccgcaaaatgacgtcgtcgccggtttcgatctcgctcgtacgggcacgtcgagcaattccagggaatacactatataagtcatgttggactcatcacccatcgatcataccagacaacatatcgtcaggacggatctcaccaaatcggagacgtctgaatcaaatgagacaatccaccgcagcgacgacatcgatcgccgccatcgccctcctcgggtcgattcaacccggatgggccgccccagcctttgacggtcagaccgtctttggtaccggtgtaggtgatcaagaacctccttctcaccccatccccgagaaaccggacaacaagatgttcaacccgttgcaccgtacgtcgcatgcctgctcgtacatctcgcacgtccagcccagggctgatcctttttcgcttggctgggatgacatctagatctgtccgctctgtctccctactatgtaccttccaaagagagtgagtaagacccccgatcgagcagtggatgtcctgtttcactcacgccactccacgttttttccgaatcgaccctccctccagtcaccccgctgcccaacccgacctgcaacgtcaccacggcctcgatccttatccgtcattcggccatcatgtccaacgacgacgaccgagaagaattcatgcaaccctttatcgacaaggtcgccgggtgggagtcggacgtcttcccacaaccgcctgccgattggaacatctcggacgagatttcgaggtggaaacgcgagggaacgtttgacgccgacgtgggagagaggaaatggtggttcttgcagcaatggcagacgcccatcaaagaggagattgacgagaaattgagcgatcggggcaaggaggattcttttgtgagtgtccggggtaaggggtcttatgcgagagggtgtgctggggctgatcgacactggacgacgatccacttccttcccccccttgtcaggcctttggacaagccatcagatcgtcctattctcacttgttcccagcccctcacacgggcaagcctcacaagggcaagaagcccatcgaggtcgtcgacatgctcgagacgtccgagtttgacgagctcttttcgcccaaacatcaccacggtcatcacaaaaaggacaagcaccaccgcaagcacaagcatcatcacggtgatgatgatgacgaccaccatcacaagaaacgaccttccaaggatcccaagcataagaaaccctcgcccccttacaagatctggacggcctcgagcgagcgagacatcgagacggcgacctcgtggatcaagggcgctttcccccgcaaccagacgggtaaagagggcgagggcgatgggttccacgtccaactcgtcaaggtacccaacaagctcggcaagggctggaaacgatcgctcaccccgcacaaggcgtgcgaagcgtttgacaagaaaccttccctcgaaaaggccgccgagtggttgcacgtctttgcgcccaggatcaccgatcgattgaggggcgtcgttcctaaactggccgaaaagatcagcgaggaagacgtcttgagcatgttcatgctctgcgcttacgaatccatcgaccagggttggtccggttggtgtggcgtgtttacggaagaggaattcagggacgccgagtactactttgacgtgagcgctcgagccgagctgatgcacacgacgtcgcttccgtgctgacgacgcggtcccgctttgacatggccttgcaggttcgattccattacatgatgggctacgggaacgagctctcgcccatcctcggagcaccttggatcaagacggcgcgacacttgatcgccggcgaggtcgaggatgaccgcaagggtcacgaggctggacacgaaatgtcaagcgccatgaagaagagaaagaacaagaaggggaaaaaggaaaagaagcccggtgacggtctgcccgagcctagtcaacctcccaacggtacccactcgcaattgcaagtcgatccgtcgtaccctcgatcgtcgcaatcctccgctgacccccgctcgctcgaccttgcaggctgcacgcgttctttactcaccgagaatcgccagctttctcgtcgaccgtgctcaacctgtacaacgctaccgatgacgccctcggcccttcggcctttttgccccctcccacggaccaccggccagaaccccgtcaatggcgaacgagcgagatggtgtcctacctgagtcacattgcgctcgagaggttctcttgcgagcccggctcggagggtgtcccggccgccatgtacaagcgcaacggagacgacaaagacgaagatccctctttcgtccgagtcatggtcaacgggcaacaggccaacatgcacggatgcgagtcgggtccggctcagagctgtccctgggaagaatggaaggagtggatcgatgacaggctggagcaatactctgattgggagggcaactgtgacaaggaagaggatgacgagtaggccgagacgatcagaggcagaagagagcggtcgaacaggtttcgatgagtttgctgtacacgtatacccagtcctgtagtcttgaaacccaaaaaaaatgagcgtgacaagtcaagatttcatctatttgcgagtggacggggcgtagtcaaacgggactatttcatctcatcatgcacaacaagggaaatgacatataggaggttttgcgaattataaacgaccaccagaaccaaaggaaatagaagaatgaagtgaaacaatcgatgaaccggaaggaaagatggcagtgatgggggtagactgaagcagcgaagtccgtttcattatgcaacgaggtgcaatgccggcactgcggggcgttatgcccagacctggcaagcattgcagatgttggaggtcgtggcgggctgatctatttccaatgctcataaggtggtcaccgggttcgtgggtatctggtgactgtatggtggctgtgggtgagctgggcattggcatcggctgactgtccacgacaactcacatcggcgcttccgttgcgacagacgtcgtaactttatcaatgcattcggcagcaaagaatgtccaagaatttgttgcgtcgcggctcctcgaattcgccattgccgttagcgacgcctattgcctgctgtccaccgttcgagttcgagtattgcatcggttgctggccggtcctgctgtccatcggcatcgtaggggtgcctgttcgctgggtaccattgatcggcgagatcgggttgatgccggcttgcgatggtacggcttgagccgaagggtcataatcgttgttatggcgggggtaaaccggttccatccggttgtctgaaggtgtttgcctgattgcgtacaaagtagcgtcagtgagatggattgcagcgcataatgtcaacgaggcaccacagttcagcaagcagagattcgtcgaggtaggtaatggaacgatggacggatggacgaaaggatgtgcgcaagggaagggtaggaagggaaaggtatagtgatgatgcgtttgcgattgcatatacagcgtgttggcagagggaagaggcaaagcaatgatcagatccacccttcatctccgcgatatgccaaaagttcaaagtctcggtttgtggggcgtagcgtgtgtcatcgcgtttgcaacgggccaagatgccgctctcaagccattccaaaaattccaggcaagacgtaccctccagatgcagcaaacggatgtccctggtgcgcagattgcctgcgcgatggcggagcggcactggtcgccgcgttgactccgacaatggcttggttgctggcgttggcctggctttgactctgcagtgcagccgtagcagacttccggtttttgctgcgaatggcacgacgagattgtcaggccgacgacaacctaatggacagacacgagacgactcacgctgcgggggacggaggaatgatgttcccgcccgtaggtccggcgccgcgcaacttctcggccctgtcccgttcgcgctcgcgttcacccctagatcggtgctggcgagatgcggaaggaggcggcagctgtgacgcgtcagtgaaagccaagcaagcgatggggacccgagccacgacgaggcggaaggacaggtcggcggaggaatgcagagggggaagggaagtgacaatttcagggtgagtgggacaggaggggaaggggtgggaatgcctcgaggcacgtgggatggactccgaaaactcacgctggtctgttgccatcccttgcctccgttcaacaacatccagtcgtaaacgccatcttcggtttctccagtagtgcggagagccttggtaaagaggtctcgcaaaaagttgtagtcgggagtctcggtgaatccgagcttcctgacatagttgaggtagatggcgaattcctctacgcgaccgaatcgaacggtctcgcaattagtcatcgagtccaagtcgacgcttcacacgggacgacgactcacgagggtagttttcgaccaactctgggatgggcgtcgtctgcttcttttccccaatcttttcgtacttctgcttgttggtagcagccttgagaccttgccagggcagagctcctcgcaggaagtagaagaagacgtgtccgaggcactcgaggtcgtctcgtcgagattgttctaagacacacgtctcgatcagcacgcctgtgagagtttcgaaaagcttgctctgtctcctccactcacctcgacccaaatgagtgttgatactcatgtaacgggcggtaccgctcagactcttcctctcacggtaaggaatgtgttgcttactgtcggtgcaagatcagtatcgcccgacttgtcagtaacgaggacccttctcgacccgttctgaccgtcatgcggcttgcacttacgtcttggggtccctgtactgcttggccattccgaaatcgacgacgtgaatgacattttctcccttggtaccgggacgtccgatcaagaagttgtcgggcttgatgtcacggtagatcaggttcttttcatgaatcgtctcgacccgggtgatctgaacgcgtcgagatgggcatgtaggtggccgatcgataagctcgttgtccgtctagaacgatagtgtgagcggtgggagaactcaccatctgcttggcgaccatggcacaagtcttgacggagaacttgcgtccacacatgtcgaacaagtcctccatcgaaggtcccaagaggtcgatgacgagaatgttgtgcagcccttcttgaccaaagtagtagacctgagggatcccagctgtgacggacgagaacgagcgtgttccaggcggtgttagtacaaaggatgacgtcgagccgtggccacgaggtgccggagatgagcggaagaaagagacgtacgacatccggacaagatcttgtaagatcggtactcgtccctgagctgaggagcgtcagactttcgaggttcctatgatggtgaccggtggagaaagaatatcacgttagctgtgggtgatacgatacggactggaagatagtagtcgtacgaatttgatcgcgacggtctgcgagttcaagaggttcgtgcctgcgaatcacccatatcattggcgtcagctccgtgcaacgggacggctatcgatcgttcgctctgcccagagctcttcctgccactcaccctcaaagatgactccgaaactaccctctccaatctttttgccgaccttgtagtgaacgccgacgacgttgctggaactgcccgtagcaggggtccccggggcggtctgagagttggacatgttgttgttcgatgtcgagatgatgtgagtggttgccatgtaacagttgtacgatcaagcgtcgacgggtgggcgaacgacagggatgaatgtggttgtgtatgagcgaggtcgcgaatggggttcggtctcgatgtcaagcagatgctgcagttctccgcggtcgatgggcaaggtgagatcctcaggtgacagtcgcctgtagatcgtccggctcgaacgaagctgcgagggcgtgtcgaattgcctcgacggtggtttttggtttttggtattgatcgagattgctctgattcaggccggagcgattgatggttcttgggtggcttgttgattcaacgacggatcggcagcgatgactcctgatagaagatcttgtcggtgtaatatcgatcaggggtggaaggaggggagacgacggtgttgacgtctggcgagactggtgtctatatagtcgacaagggggaattgtttgatgcaccgtgaggtgcaagaggagcgggatctgaggggttcgaggggttgcaacgcggaccctagaatgaggtgattctggcctgtcgcgagcggagtcgacttgaaaggaaggtacgaccgtcagatcagggctaggcaggagccaaggtcgatagtgcgattgacttgtctagaggaattgaacgagtgtgaggatgacgaccaagacgggttggttttggtttgggttagaggtcgaggttggtcgtgtattcgaatgacgatgtcgaccgaccgagcaggcttgggttcgggtgattcctttgtgatgagcacccgcgcgtcagcgaaaagtatcaggtctgcggtctgaagccagcaaggtgtgtggactgcaccctccttgtttcatcacgatcacatcagtaggagtgtatctatctattgatctatcgtatcgtagattacaccattcgaccggactagttggttgttacgacagagaatatcatcggtcggcataagataaaaggcagcagtctataaagtcaattaaaacgatcatcaagcaagatcgtctcgcgtaccctctgttccgtctgacgaactagcctatcagcaagtgcgtcatcccacatccctcaagctcgtccagacccgccaaagtgcatatccctcatcagcggctcgagccatgcggccttcaagaccttcttgttgacgaatctcctgttctcgcaagtgtacctaaagtgccgggatcactcagcgctccgtcgcacaaagtatccgcatggtgtgggagacaagatgaagactcacttgatcatcttcgacgtagaagggaacatcaaccgtctcaatggctcgtagatagaatccatgtcctcgtggtcgagtgcagaacccttgcggcgccgagcttcagcaagtctctcgtcgacttcctgtcgggcatcaaaccagtccctgagattgatgtgggcatgcgtcttgagaagccagagacacccggtccgagtcgttgggacgggagcaatgacaggtctaggggtggaacagcgggaagacttgtcggccatggcggtacgatcggaagccgtcgagatcgtggtcgtagtcgagctggattgacgacgtttcgaagggttgcggtggatgagttcatcttcggaagagtctgcgtcgctctgcggttgagaagtcaaagctggagacggaggtacggtcctcgtagtagcaggcagagctagtccgagctggaagtaccgaccatttgctgttagatcttcacctggattacaacgatgcgtagcgtgtactcacctcgatacaaagtccttgccaaaaacacaatttgttattcgtgtcggctaaaaattccgggtcttgcgcaaggtaagcacggacgctagagtgcgcttcctcgtaggttgtgacgctgtgtacgtcgtgatcatcatcgtcataggtgcgttcttgttgaattagctcggtgggagtgggtgccccggcattaacagcgttacgcgagggcaaatcattggcggggctgtcgttcttccgtttctgctgtgtttctttgacctgttcaggagctggctcaaggggtacagcgtttggttggttcaagtggagggcctcaaggccgataataacggcggatgagttgctcagcctttggtgtccagcatcaggaccgggactaccgcgcctcgaaacagagtgatgcggcgccacactctcgttcgaggtcgaaaacttgtcgaaaacgcttcccgacccgtcggaagggtctacaactagatacccactgtagagagggtcggctgacggagttgtgcggggaaacgaaacagaggacgaacctcctccagggactccaggaccgaatttagatccagcttcatgtggcgaattggcctgagagtccgtcgtggcctgcttcgtgtcccctcttgctttgtgctttcgcctcatcgcccggttcggaagtagtacgccggaatctgtagcggtcccctcagacgtccctccggtggcctcaggggtccctcggaccaaacgaaaactcgagtatgctccggctgcaggttcggctcgaaaattatcttcgccccttaccacattcgtttcagttccaatcgcatcgctttcggcagcggcgggtcctgtggatccggatgggccttgcccttgttgacggtcggccaactttcgagcactggcacgtttacgcttttctcgctgagcttctgctcgtttagccgcctgcgcctgcatgaccatctgggccaccgtcagatcttgtgacgcatcggttgacccagtggcttgggtcccagtctcgaaatcccgccgccgctcgcctcgagcgggcttcttccctctgcgctttgcgctgctcttcctgtgctgactcgtcatctcggcgatcgacatgtctgcgacagaggtgactccagctaccgaggacatcccaggctggctttgaacctcggaccacagctccaaggctgtgggttcgtaggtggtggagatcggactgatgggtcgcgactcgggggtctccggagctgcactttccaagccggtcgctttcgagctcttcttcctgccagacctcctggatttcttcttcttgacaggatgatcaacaggaccgcccgtattgagctccatcagcaacgcggatgtatcacttgcagatgcatgagcatgagcagatgagggccgcctggcaggtgatccgggctgaacggtgtgtccactctgattcgcctcgactgtcgccgtgggatctagaccggtctccttgacagacctaacctttctggtcttctcgatcttctcgctgctctccttcttcgacttgttctcccgctgcttctcctttctcaatgtcctgtgctctcccgtctcctgactcttctccttcttggagtgggacctcgagaggatgctcttgctagccagtgtgccccacgcggaacttcccgactcgacggaaccggtactgacgtttcgcacctgatgaccttgaggaatgggctgatcgtgctgctcgattgacagcttgccgagtctttcagtgatcgtctgcgaaggccctttgatctgggccgagcggggcgtgatggggaaactgggagatgtgggcgatgtagggaacggtcttgtcgaccggggagaagcaggttcgcctcgagataggacctcccatgtagaagatacttcggactgagacattctgacgaagtgaggcgcgctgatggatcttgatcacctcggtttcccggtaccaccgaggttgccaccgagcgttgatgaccgcgagtcgttcgtgaggccgttcgcgagcttctgatcggcggacagtggggggataaaagtcttgggaacttcaatgatttgaatctctggtactgtaagctattggcagcgtatctcgtccttgatactggtctgaaccgactttatacatctgagaaaggtaagggatgagtcaacctccactcgattgattgatcgttcaagaacgagtgaggtcaagatccggatccgcccagtagtgacggaagcaaatttcgactcggcctcggtgattgacccgcagcgccagccgtgactatgtcgcccaaagaggtatcgaagcgaactgcatcttgtagtgggagaggtggaagtgaaacgcaggaatcggatcgatggagagcgagcgatattaccaggcatgatgctcaaagcaagagaatctcgctcgcgccccgccgcgattgaagacgttacaacccttactatcgtcgacaggtcccggacagcgtcctacacagatcttgccacgaatgtactttccgccgacgttattaccatgatacgggcatccgatgggggcaaagttccgaggaagtccgtgcacatcttctcgaagcgacgcagaccattccacctctcttacttgatctatcgccttctccttcctctcctgagagaaaataatcggcagcgtgagcgaaaacactcgcctttccgcgtgatttcatctgcccgtaagtaatggtgtacgcaacgtgtgggcagattaaagcagctgggtgtctagatctgcgacacgtcgccagatccgtgcaactgcgggaagtttccgcgtcaccgcaatgtatatcggtacatcgctgggtcaagtccgaccactctgttgatctgtctgtgaaaccagtgaccggttgaatcattcaattttaccgctttagggtaatatgggaaatatagatcgtgtctcgtaggcatcatcatacaggtcttatcggtgggaacagcccaggagtctcgcatgtaactgacagcagcttgaatcttcttgccaacgacgtaagagaaacttcatgctgatgattcgccgttaaatcaccacatcatctttccggcttgttcttgcgccatcaacacactgtcgctcgagctcgaccgactgttcatggactcagccatccccgaatctaccttcatatgctgtggccaagtcgcgactgtacgaccttacgggcgaccccgaacttcgagatgccgcggtgggaccagggtgcagggcggcctttgcggcctgaggctgggtacaggagtaagcactttggacctgccatcttttcgaccccttatctcgcaaagggcagctaggggaaacataagtgagggaaaggagggcaaggagagagcgggggccgacaatgaccgcataattcaccgcgattggcaggaccaagtcgaagctccttccggtgagctccactgcaccggtgaactttatgagtacttgtgtctcgttaataatcgggacggaagggaggtttaaattctctgcgcttcttgagtgacttggtgctcttcttcgtctgtttagcacatacggccgttcgatcatgcagatatggccctgacgatggagcagatccagccggtgtcataggccgcaatcgatctccacttcgcccccttgccaaacccttcctgttggaacctgtccgcgatggcgctctcggcccggccagaattcctgagccttatcagcgtctggccttgtcttgtgtgcaacgatagcttataaaggctaagttcaggagtgacgtgtcagcgacggtctcgtcgaccacatccgaccgagaacagtctcaaaactgagcgggcggccaaaagacgctcgagtcatgcagctccatacatcctgaagacgtcagcacaactttgcaattcaccaggccattcacctccacacggacgtcacacgacggtcggggtctgccttgatttgaatccgccaaatgagcgagccattcgatgattcgtcaagacaccgctcgtttgctcatctgtacctttgcagttcaagtagattctaggacacccgaaacgcattcgaggcgatcacatcgaatcgagcgtgcggatgtgaccggctcgaggatgacgtgtgagcgcggctcggttgtgcaaacgaataaggattgtcggaggaggcgtttcggttgtttacagcatggttgttcactcaacatctagctgaatttttggcgaaatccatttacaaacaaaagttgtctggtgaatgaactggtacccaggatgtgctgtttgaacttggaacaatacataaatgggatgttgcgatgaacagtccgtgtgtttcaggtgataattcgtttttttgtcctgagactcgagacgggagaacatttcttctctttgtttcgatggctattgtccgatttcgaggaatggtttgctgacgttctacggtttcgatcgaatctcgcttgcgatcgacgtgggaagaaaagcgcgcgcgtggaaagagtggatccatgttgtcataaccctagaaatcttctagcgcgattatatcggggacgaccctctttttgtgcttttcgcggcgttggctcaattcgaagctcgagacatttggctggaaattttccgatcacgagctcatacgggtcagagcagacgcatcgagatggtagtatgtgatggtttttcggctggatgtaacgaagcggtcgtcgcccattcgaaaaggtctatgacccttgaactgtatcgaacactgggtccggggaccatcgaccagatcagggtacatgcagatggctccggcaagtggagggaccctccgcatcttccgctgccatgggcaaagaaggtcgagcattcttccttggagtagggagcgagagatccagcgatggacggttccggctgtcatccccgccccgacaccgggaccgggacagtcagacggggaggaaccaggccgcgacacaggggagcgagatgattccgaaaaccccgctgcaaggccggtagatgttggatgaaccatatgattttcagggtttgagctgagctcaccagtctaccatgtcgaggttgagcgggggtaatgcgcggcagcctcttgagtgcggggctcgcggatagaacctcggtcgagtgtctatctgttgacaaagtgacaacgggaggagaaaacaaagagaagggcccgctgaaagccatagacgatgcggcgaaaatgggatgcgccgacctcggctaccccaaaaaaagggtaccattagctgctcggtgtacaactggctccttgtgagggcgacaaccctctcgggccttgttctgcattatcgatcggggcatgcggtcggtcatctcggggtaatgccccggtctcctcgtcaatcacgcagctccttttttttttttggcgagatcagcggctttgtctacgtctctagcggtccgagcgggtatgaccctcaaatcagtagtgccttgaacccctggtttcaacttgcatccactgtaccccttcagttcaagcgagcgagcgaacgattgcatcggctttcgctcctgttgcccgctactatcgcagatttatggactgcgcatgggcttttttacatcatcaccctcgattgttcttccctcggaatagactccacccgggttttttcatcgaacattgaggacctctttgtgcgaacgctaggtcgtatgggcagacgcactttcgagcgagaattgtataagtagaggtctcgacatggacgattcattccttctgctttgggaacattctgctcttcaccaacattctctcggactctagcttcgacaccttcaacaaaaacatcaaacctcaccacccactctacgggaactcacggctctaatcgtcacacacgacgacaccaccaacaagaccgacttctagacctagcttttagctcaatactccaaccccaccaccgaccaccaccaacacaaaaacaaaacatcaacaaaatgttctccaagaccgttgttgccctcgccgccctcgccggctccgtctcggccgctcctatcgagatcagcgccaacgccgccgatcccagctcgatcgacgtcgctgcccctgccggttgggcctcgggatacctcgaggactacgagaccttccgtgtccgttacatcgccgtcggatgtgactaccacgtcggtcagcccgctggttccgacaaggccaactactacgagacctgttgccaccccatcttggccaaccagactttggccgaggtcaggccctcgtactgtctcccctcggactcggtcagcgccgagatcgagtcgatcgttgctaccgccacctgggtcaaggaggccgccgtcaccgtgagtgtcgttgttttacctcagcgcgcgcgcgtttgaccagccacccgactgaaactgaccgacatgtcttttccccacattatcaggagttcgccggtgccgcttcctcggtcgccgccggtgtcgccaacatcacctctgctgctggcgagaacttgagcgtcgttacctacaccgacgccaagcagaccgccaccttgtccgtcttggagtccagcgatgcccctgctgccacccccgctcccgctgctgcctcgagctccagcgtcgaggcccctgcctcgtcgtccactgaggaggccgcccctgctgctaccacctcgtctacctacgaggcccctgcttcgagctcgacctacgaggagcccagctcgacctacgttgcccctacttccacctacgttgcccccaccacctcgtctacctgggaggctcctgctgccaccaccgccgaggtccagaacaccgtctctaccggaggtgactcgcactacggtcaggctacctacttctaccagaacggtaaccccggtgcctgtggaaactacaactcggactctactcccctcgtcgctctccccgctcagtactggggcaacggcggctcgcagcccagccagtactgtggacagtacatccaggtcaacagggacggaaggaccgtcaacgccatcgttgccgatctctgccccacctgtgtcggctccgactctatcgacctctcctcgggcgctttcaaccagatcgcttcccccgacgagggttccgtctcgatctcttggaagttcatctaagggattcccccctgatgtttgaccacggattcaacaacacccctaacgacccccctcacgatgctggcatctctacactcttttctatcataaattatcattttgggtctcgggttgcgctgtatccatagaattggatcatatctcataaatgcgagctagccgcgcttcagagttccacttgctgtctttggtccatctcgatagcgtttagaagcagactgctcactcgatatcagccgttcagttcagcggtgtgacggtttctagttccccacttctatgaaacagagcgagcgcgtgcgagcaatgccgtaatgagtggacggtatgatgtcggccaagctattactcgcagatgtatcgctcattcttcttgaatggtatctagatcaaggtctagggaattatctccgaggcgtgtcatgtatcaatgatcaccatcgtggggctttcttagaggatgattgaacgcgatcagggaggccgtttgagaatagcaatctccaagcggccgcgttttaggacagctgctctcgtccgggttcgaaatcccagaaaggacgcttgacagggttagaatctacactattctgtattggaagtaaattggaattgtgaactggagaaacaatcgacacgcttcccagccgcattgaacccgcataccgtgagtatgatcaaccagatggggtgacatcgccagggtcaatcgaaccggcaagctctcgtcgttatcgtcgtttgagcgacagggattcagtccaacggggatcctgtatctgtgatagtcttgagtgccaaagtgacatcttgtagactgtgacatcggaagcggaaaagggctttcgtgcgcttcgaaggatgaggtcagcagattgtgtgcgccagccagccgaagaagacgggcatattcgagaaagcagtgaacgacttccgcgtgccgccgaaggctcacttgttctgtcattcaatcgttcgtttggcggggcttttttgagctttgcgtcgatttccgctcctgccacgagtatatcctaggctctgcgtttggcgcgaggcaagagcgacgcatctatctcacccgagtttaggaatcaagcagaccacgtaagcttcggaaagcttcagaatataccggtatgatgctgtctcagcagctgtggcacagcatcgatgacaggctgcaatatcactcccatgtcgttgacgtaagtgtccttccccgtttcaaggcggacagcgccctcgcagccatttgtatgaacttgtgccgacagactgctttctcgtcgattggtatctacctacttctcgttgcaacccatacagttggcctgtaattcagtgcacgcagcactctctgtggtcacacgttttgagcttttcgatttccctgcaacctttccgatgttgccgccacacggcgattgcgactagacaggtagctggtagctggtagcaggtagtgagagcgcctcaaacgaaagatggttctgccgcgacacggacattgttgagtattctcaacgtccgcgcgttctcgtctcaacccacgacagacagacagacacctaggcctgctgcacctttgcctagcattgcatctggcaattggtgctttgatttcatctcgagctatactcagcacctcacagctcgcaaacaccggtagtggctacatgaactcgaccaactcgcgcgatgtacagatcaagagctgccgtgaccggaacgaacgacgtgggtaccctgaccatcgaccgcgaggcgactgcgattgacaatcatctctttgccatacctttctcgaccatagacccctttgcctaaccgcaggtggggccctgttgccgatgactctcaacctcctcctcctcctcctcaatcaggtggcggtgggtacggatacgattacacaggcggagccgctgctcaagacaggggccgggatcagcagcctcggggagatgaaccaggtcagtgccgtcgatgaggtatcgccacgtctggtcgaaactgaacgcaataacgcacaacccgttaacagctcctggcgaacctcgaaaacgacgatcccgatggggtgatgctacggaaaaggtcaacatgccaggtctgcctacggccgtaacggggaacgtctcccagagcgagctagacaactacgccatccacatccgtctggaagagatcaaccgcaagctcaactcgggcgacattgttccccccgagaggatgcgatctccctcgccgcctcccatgtacgactcgcaaggtcgaaggacgaacacccgggacgtgaggtacaggaaaaagctcgaggacgagcgggtccgcttggtggacaaggcgatcaaggccgatcccaacttcaaaccccccgccgagtacacgttccacaagcgaaacaaccgacctcaggaaaaggtctacatccctgccaaagagtttcccgagatcaactttttcggtctcctcgttgggcctcgtgggaacagtttgaagggaatggagaacgcttccggggccaagatcagtattcgaggcaagggaagtgtcaagcctggaaaggagagaaacgatcaatttgccagtgacgaacacgacgagttgcattgtctcgttatgggcgacacgcaggaaaaggtggacaagtgtgtcaagctgatcaacaccgttatcgagaccgtgagtcggtcgagctgggtgtggtggctgtagtcgtcggctgacgtcccggttgaatcgttttgcaggccgcttccacccctgagggtcagaacgatcacaagcgaaaccagttgcgagaactcgcctcgctgaacggaacgttgcgagacgacgagaaccagttgtgtcaaaactgtggagaaaagggtcaccgaaagtacgagtgtcctcaggcaaggtcattcaccgccaacgtcatctgtcgagcgtgtggaaacggtaagagcttgcacgtcccgtgccaaagctgccgagctgagctcatcttctattgcgccgcgacgcagccggtcacatggcccgagactgtttccagcgaaacggacctcccggcaaccaattcgggggaccaccaggaatcggaggtggtgcacccggcgcacccaagtcagagtttgacaacgagtacgccaacctgatggccgagctcggggaaggcggtcaggttcgatcgtcgggtcctgtcgtagggatgatcaccaacggagccgccgcagacggtacgcccgcagcgcccaaggtgcctccttggagggttcccgaaaactggttcagtaacagtgagtcccaagcttgtagtcgtttccgcgtcgtatactgatcctcgactcgacgtcgtgaatgtcagaccccaaccggggtcctcacatgggtggtggtggcggatacggcggacatatgggaggaggtttccaaggcggttaccagcaacaccagcagggaggatatggcggtggttaccagcagcaacagcaacagccgcagcagcaagccggtggataccctcaggcccaagctgctgccggatacggtgccgctcagggaggttacgacgccaacgctgccgctgctgcggcttacggtgctcagggtggatacgatgccaatgcagcggctgcgtgggctgcacagggctatggatcgtatggtcaacagcagtctggaatggatcccaacgcatacgcggcgtgagtttgcgatcaagctcagaaagtgaagccgttgagctcatctgcattcgcccgacaggtactatgcttctcttcagcagcagcagcaacagcctgccgcttaaagtgacaatcggtgtactgatccactgacgtgacctcgtccaagcgcgtcttcggactaacaccaagactaactcaggaaacactcacatctctgttcgaaatacaaattgccaaatcgctaccaacctgttcgacatgcgcccgagatgtcacgaactcgccgtctgacgttctaaccgattgtacaaccaaaattcgcgtttctcgctcgattctctaactctgcgcgcgatctttgctaagattaacaatctgacctcgacctcgtcgttgtgactcgcaacgctgattcttgctcttcctgctgatcgtgtggacatgatgtcagagctagccggcctgcaaatgctttctcgtgctgtaacaaagggtcgtctcgtaaattgtactcgtacgatctggatcgatcgtaccaccagccaaagatgacgtaaaccgcccgtcgcgagtgcgcgaacaaaaacaaaagcgtcgaacctcgaatcactttggatatttggatcagagtgaaatcttgccaaagaccacaagtcaagtcgaattcatcgctcgcaagagtcatattgagcaagtcgggaatcacctttctgatcacactagatgtccttgtctgctcaacctttaatgagcgtcctggatacgccgcctcaggaagaggtcgtcacgaccatcaccgcgacgacacatatcgacctcccgcttcacccaaggaaacccacctatgctgagctcaaccccaggtccaccccgaccgaattcctggggccatggggaaccttggcggtaaccctgctcactccgatcttttgcaacttgctcttcatcggttgcaatgagcggacaggatgtcctccttcatggaaccggctagagggcaggttcgaattcagccgatacgacgtcgacctgctcatcgataagctgttcgacggcaaagcgtttctggtctacatcggatggtacacgtacatggtgctctgctgggcttatatcccgggtgactgggtcgagggtactttgatgcgcaacggcaagaagcagatgtacaagatcaacggtgagtagaagcttgccatttcgggcgtcatcatcacctgtagaattgattcaaccagacgcaaaactgactcatatcgttgcctcttcaataaatccagccttctcgaccttgttgcttactgccggcctgatggttatccccatgtccacctcgaagggccaagaaggcctctcttggttgtatgaccactggctcggtcttgtcaacgcttccatcttgatggccatcttccagtctgtctgggtctacatgtggagcttccagtccggcgagttgctcgccaagggtggcaacagtggagtctttatctacgatgtaggtcgacatgccacgacccaaacacattcggtgactgacgattctgtcgccagttcttcatgggtcgaccccttaaccctactcctcccggcttccccgagttcgacatcaagcagttcaacgagctccgtcccggtctcatcctttggctcgtgctcaacgtcgcttgcctgtgcgagcagagcatcagactcggtggactcgccaacgtcactgcgagcatgtggttggtgtttgtcatgcagtccatctatgtcgtcgatgccgtatacaacgaggtgagtggaacatgcgaccggaagctgtcggtcccagcagcgggctgatccggcccctttcatgcgacctggatagacctcggtcttgaccacgatggacattaccactgacggttttggattcatgctcgccatcggtgacctcgcctgggtcccgttcacctacaccctgcaagctcgttacttggctttccacccggtccgattgtcacccttgagcgtgatcggaatcatcgcgaccgaggcgacggggtattacattttcaggtctagcaactgggaaaaggacgctttcaggagcggcaggaatccgaggagtgagtcttgatccggctgggaatggacggccgctcgttgctgatttgagacgtcgacttgggtagacctcgaattcatgcagaccaagagtggcagcaagctcttgacttcgggctggtggggccgatcccgacaccctgtaagtcaccactaaaaaatgaaatgattgccgagaggtaggactcgactgatcatcctgtcatcgaccacgctggcactcgaccgtctctgtagaactactttggcgactggctcatggcgtgagcatcgagagcaacgcacaatccgctgtcattccttactaacgtgacgcaatgggctacctctcgtctagcctggcttggtgtcttcctaccggcttgaacaccccgatcacctacttttacctcgtcttcttcgtcatcctccttttgcaccgtcagatcagagatgacgaggcgtgcagggaaaagtacggttctgattgggagaagtactgcgaaaaggtgccttataggatcatcccctatgtggtgagtctttcggtcagatgcatgatctcgataagtacagtggtgctcatcatacagagctggttttgtggtagtactgagggggttatgccgcggaggaagctggaaaggaagagaccatgcgagacggggaagcggggtgtcgaggtcgcagatataggatagtgaatcgaatgttaccgggcgggcttgggacgagcgatacgaagcgcgaggggcgtacgtggatactatgaaagcacctgcaatacgtccagttctacggatatgaaattcataatctcaagatatcaagactaatgattgagatgtttacggttcatttaaccctatcctgcgatgaatctaccggtgattgttgttgatgttttgatcgaccggaacaaaagtttccttccgaaaaggatcaagtcgagactggatctggggtactcactagctgatatgacactggtcgtcggtcgagccgcgctatcccttacaagaatgcgctctattctgtcacagaagaatgttgacagagcagtgttctgatcatcctccgagtcattatagttcggccgagcgaacagggggtcccccagaattgtttgtctttcgtcaacgcagagataattgacaactttaccaaaaaggttgatccgagatccgagacgcgcatcagcacggcaactaatttggtacagatcacagacattcaccatttatcggtcgatcactttacaccacaactgatatctgattcatcccgttccctgtctgactcagacaccacagagtagactcagagcctggttgctcttgaagaaagacagtccaaacctggtgcacggactcgaccgtttcgaaccctggatcaaacgcaaggacgggacgcgatctccatcatatcatcaccatctccctctccggatcaaaccctcgaaaaggtcaaagggacgcacacgcatacacagcattccgggtcgagactcgaaacaaacaccatcgtagcttcatcgtagctttagacaacaggatctagcaaggtacacaccgaggtctatcatcgcaacacttggactcgctgctcgtatatgctacacctgtcatcatgtctggctacagaccgtccccaccgcccgtaaggacgcacaacctcaacccacctccgaaacgttctcgtgcaaaggaaaatgcttcaccgaccacctacagcttcaatccttctcctgtcaaggcgcaccattcgcatacgcaacatgcgggtcaaatcatgtacgacattcctgtacccatctcgcccaaccccgagtcgagcggggtcatggagaacctcaccgccagctcggacgctggagcgatcggaagcgtctcggctcacccgctgataggttctaccacagggagggcgaggagcacgtacgacccttccgcagggggacccgagaggaagacggggaacgctatcgcctatgctcaatcccgttcggcaggtccgccgaggatgccacccaggtcgagaagggggagcagggagacggtcgaccggatcacgctgagtcgtaacgattcgtcttttactacaagtaccggcggttccggcgcgggcacgtacggatcggcaggtagagagaccttgtcggccagtacgagcggaggtacgttgggcgggggttcgagcccggtcaaggcggcgtacgaccatcgtcagagatcgaacacgaccacaccgacaccgttgggtccgtctcagcgatctacggacgtcttgatcagtccttaccacgaccacgtgcccgtccgttccaagaccggtcccacacctccacctaggttgcagacgtctcaagctcaccaacaggtgccatcacgtctgggatccccttctccgaacaggcagggcgagatgttcacatctggagctgccggaagcatgatgagggaagcacgggaaggatcgctgtataccgttgggcagcagagcgtggcaggaagttatgtcaggagagaaggtgggggagtgggaagtcccagtccaggagtgagtctcatatgaggtagcgtcttttgatcgacggatccgactcatgacgagacttcttgaaccgacataggatctccacacattcgcccatcactgccatctattctacttttcgtcaaacccgcccaactcgtctcaggcgtatatcgatgccaccctgacctcgcttccgccatctcatcgagcagcatacacccgcattcagaactctcttcgcgcgcaagcgcattcccacagcgcacggctccgtcttttggcctttcacgtcctcatctcgtccacctcgatcaacggtggactcagcccgttggtcaggcaggagatcaggtcaaaacgcgctcgggcagagagaaaggccaagctgaacgagtttgtcacgaggtggtgcaccaagagcgctgtcggggtcgaccctttcttcagggcactttatgtgtgtctgatgttgcaaggcaagggagaacgcggggttggcggagctggtggcaagaggatcgtgtgggaggtggacgatgccgtctttatcgaagctgggtgagtgtggccgtgccactttgcacctgatcggcatgcactgaccgtctgttcacatggcacacagaggtaaagattttatgaacgaggcagtagcgctcatcaagggtgtcctcgggttcgatgatgtcgccttgtctacgcctccccgattgcgccgtccgactctaccaatgctgcagcctcgaccgtcttttgcgacaaacgcgactccccgttcgtccttttccgaacagcagcggggacacgaggtcgagagtctgttgccggtcggatctagtaactcgagcacttctgctgtctccggcaatcggactcgagctccttccgacccattcctcgatccttcgcgatcaccggacaagcggtctgcagccccagtagctacctcagcggggaagcgcggtgctgcgcctcctgtaccatcacacagacgttcagcgtcaggaaagggtcccgcgccacctccaccgatatcacggaacttgcaggcgcccatgcctcgaatgttgcaaagccgcaccccatccacagacacctcggacggtctctcttccaatcctcgaagtccgaccgtcgaatcacctctactcacaggacgttcaggcggagattcggacttgatcgtagcaggtctagaggaagctgccgagagggaagatactctggctagtcttggcagggccagcaaggacaaattagggctgaatcgaccgatccggcctgccaatgatgcacgttcgctgtccgcgtccgaaatcagaggcttactggagggcacttcaacgttggacctcaatgccgagaccgcactcgataccgaagaattcaacgaggacgaggaggaggaagacctctcagctccccgcctgcgactttggacctttgcacctcacatcaccgacggagagatcgacgacctcctgacaatcttccccaaacacatcacaagggctcagggaatgcggactacacgattacccttgccccgcccggcttcgctcagagcgttgaaagcgcacgacgccgagatgggtttgggcgccaacgatggtgaaggtgaaccatcgtggccgtccgtcatggacgtcaaggtgccacctgatgatgctcacggggtcgtgatgttgggcaccggtcgattgtggcttggcgcatcgcctcgagatgcgccgtggcatagaggattcttcgagaggttgtccaaatggttcaagggattatttggaggttgaagagccagggtgcagttacgccctggctcaccataacgcaattgtataacgacgcatattacgacccggccgcatgctagctactgtatcatcataccattccgtcacgtcttgtcggttctgtcgttatttgtgatcttccaaagcgtccactatgcgttgcatcaagtctccctcgcgctgaaaccaagctctttctacctctgttcggacgctggcatgactcgaaggcacgatcgattttgccgtcagcttgaaggcagccgagatcggccggtgatccgatgtggtcggttcgtaacgtcgatagtgaagacattctatgcgttcgtcctgtcgggatttccacagaatcctgtcgcacctgggtagtacaaggatagatgcagcgtgttagaagcgaaagtaaggctgccgtgcgcacgcggccgctcaccaggcggggattcgcttcttctcggactgatcatactcgatggagttgggcgtatatttatatgtcggcgcgaatgtgattggcgcttcgtggaaggctcgaagtctgaacgacgtgttgctcttgatctctttgcgtaattgatcgtgttcgagcaagtagtcgaggtcgccggcgtttacgcttgagatgacgttatctcgtcgttgatcgattcgataattgagatctccattcagaaagacggtttcgtgatctaatattgcagagccgtctccaccgttcacgtaacttttgccagtatcagatgttgaaaacacagccttttcttccaggatgccagcgacatctgcgtttcgggcggccttgtgactttggcctgcagctaaatgcacgttgatgaaacagaccgaactatcatctatcgtcattcgcgcgaccaccgcgccctgaacaatccgacatggaggataagcgtgaggatgcgatgtgtccatcatttgcgcccggaacttaccttgttgccgtaaaccccgccaatgcctctgtaaacgaaagcggaccaacgtcgtgagcgaacgtatgacgacacaaagcatcccgcgagataccttttaatagtcgtgatggcgacgtcgcgcagcgagtctctaaggctcgacttcacgaagacgaccgtcatcaggccgaccatagattcggcgtcgagcattgtgtatccgcactctggaggagtgttcatgcgcaccgccatttgcagcttgtcctgccagtcacggtaagctcgagacaccccatcagtattccctcggccgtcctgcttgctcttattaccaaacaacatggtttctgttgtggcagtgtataaattagaggggacaaggcagaaacatcgttcttgtatacctactcgctgtcaattttctgctgttcagatcaatcacttcttgccagccgaagacaatgacgtctggcgaatcgaccgaggtgatgcactcttgcaagaagctctgattctcgatggagccagaaagatcacccggtttacagctgtcaatattccatgacgagatgagaaccgtgaggtcgcggaagcgacagtactctgcttcacgctcttgcatagccgtctctgcccgatacgcaaattgcacagtgctcagcgggtgcgtgaatgtcttgttcgttctcacttcttacctatccaatcgacgctaaggagaccgtcccaggcatggagtgcatctcgagcccatgtccatacagcatacttgccagactagccaaaccaagcaaggtgagcaggaccaagcagtagcatcgacttcatactcacctgatctatagaatatgggtcggcgtaaattttctgaatgggcaactcgctgtagtgaccgaggtgagatggtatgctgggaggtgagatcaatcatgtactgaaactcacggatgagccacccaagtgttgatcgttgtccaagggctcgtcctggtatcataaacgttgatcgtcccgcctctcgtgccggcccaaagatagtctcctacatactcgagcccgagaatgtcggtcggcgagatcttgagtacctgacgacaagccagcgagtctcgatcgaatatcgacacgtacccgccctcgtgagcgagatagacggattgcttatcaaagggatcaaaagtcgctgccgtgacagcgcctgtccactccgacgtaaaggtcgtcttccctgccgtgttccccgatgtgacacccgaaggatcgtatatacgcaaagtcggaccgcgtaacgcgctgttcgtagtcgacctggcagcggggcctgaagcggtccacagctgacctcctagcatggtcgcaaagttttggcgatcggccgttcttagagaccgacaaggtgcgtttgtttgtctgcgcgagacctcttcgcctcctgtgaacggtccaaaaacgttgaccttgccaagttcgtcgagcgtgaccatccattcgtcatgtcgaaagacatgcgtgatcgaagccgaatggagacccgccttgacgtcggtaatctcacccgtcaaggtatcaagttcccatagatggcccatattcgttccacaccagaggtacctgccctcttcgtcgcttgtggcaggtgagcggaacgacatggaggtcatcttgatatccttacccttgctgtccaaaccggcatgtctcggttcgacggtcaagattggtttaccatctcctagtgtcagatcgaacaccttgacgttatggccgcctgtacatagcttgtggcccgatacggcaaagcaatgcgcatgatgatgtcccccgagcgtgacccgttgacgaggcacaaagtcgggtacacgccggttgacccgggtagagtctggatactctgccagcgctcgatttgcggatgatttgaggttggcgatcccccggctcccgctttgcagggcggccgaggcggccgggtcgggttcgatctctccctcgtcgtcttcctcgtccacgacgtcttcctcggaatcgtaccgatccagggaacgggtaggtctgggtgcgactgcggaggtggaagctgtcgagctcgtcgagcctccacgtacaggaggaggcggtggaacccattcgtctttgccagtcaggtcagcgctttccggctcaaagtcgaccgcatgcgattcgactccgtggcgctgtgaaagatgaccgtgaccgggtgcgtgtcgtcccaagaccgtggtagatctcttgaccatgccttttagcgagtctgtcctggacgcatgcccctgcgcctcggccgtgcgggtgggaggctgctgagtccgcccgacagcgagtgaggaggaccgactcaacccggtccgaccgttttgatcgggcaggttgcgatcgggcaaggtaggcggaccgggtgtgcgtggagggagcgccggcgctggggtcgacgtagatagcggtacagaagacggttgagcacttcccgacgtttgtcggggaggcagaaccggcgggacgctggctgaaccggtcaacggcccggacggtcgatcctggtgttcgacgtttgacattcctcgagctacacctcggagcgtcgagtcacttgtatcgtcggtttcgttcctatcgaggtgtgaattgaacggctcgggtgatcgactgaacgtgatttcggtcgcctggtcattgaatgcgcccgaggtgtcatttcgtcgtctagtaggtggcgggggcatcaacgtccgtccacctccggtcgtcacgcccgtcgccatgtccttttcagcctcgaccgactcgtggactcgtgattcgtggtgtccaatcaccaagtcttgctttacgggtagatcgactttgggacgagaatgcaacggcggaggtggcgggggcggggtctggcttcgaccgatcacgggtctagagtttgacaacgagttcgggttcgagctcgagctcgagcccggattcaatatctttgatgtacctggctgcgaggcaccgccttcacggtccgactccgctcggaacccgacagacgacgcttctctcgtttccaagctgggtctctccgtcctcggtacttcgcgcttgagcagtgaagatgatggcatcggggttgttgctcttgaagacggacctgatggaggacgagaggatggcggggtaggacgatcgaacatgttcctcaaggaagaaacggtggtcggaccggggatctcgttcggggtttctaacgagtgaaccgggtgggacgtgatggccgcaataacaggaaccgtgggggttgcccgtccgctcgtcgaccctgtgcccgtgctaccggctgactgcagtttcgacaccgagaccgtgccaatgtccgagtctgcatgcgtacccgtgccagacccttcatccctcccagctcgtccgtcatcgatccgacccgcgtccgcacccgatcccactcccactcccgaaccttcgttcccgaccttggagcccacgtccgcgtccgcgctcgagttcgaggtcaaagtcgatccgaccgtcttgatcgacttgttttccattcccttgcccgtacccgtacccccgctccctaggggtcgaggtacaggcggaggaggtttcttgatcggtttcgtcgtctgtgttcctttggctgcgctcgtcgtaggtatcggggtggaagtcggcgcaaatgcaagcgcaggtgcgggagaggaggaggacgagtctcgttcgagctcgatcgataggccggggttcgacgagtctgtcgtatctaccgcaaaaggctttttatctgcagctccgcctctttgcgacggcggagtccatgcttgtttacctcgaggaccaccgcccagcccaggtccgatcaaggacggcctggactccggtccgaccgtgttctcgaacctggatcggagggaagagatggaccctatcgacttgacgtcgactttaccgtcctcgtcgtcgtcatctgctgctgaagcagggtcgacgtccgtcccggtccgatcgccgacccgtctttcgtatgacggagccggcggcatggttggctgctatgtttgtctttgggagagacgtctggctacctgtcctgatcagatccaggtcggacgggtctagggtgtgattgtgggttcgtttgaattcgaatctaagagctgtaggctgtaggtctctgtggggggggtgggggtgacgtcttattccacagccccccgggaatttacatccgacgatgaggctgaatgaatcggatgtaattggaatccaatacgtaatcaggcactttacgataatcatgccgtcatgccgtcatcctgctactcaacccttgggattaccatttccataaagcgcgcccgttttgaacattcaagcgcgaccgaccgagtcgaatagcagcaaccaactcagtatgcatgcatgtcacccagcatcaccaccactcggtttcaatctgataaccacgacctgacccagtacaaaggcttcccacagaaacaaggctcgtacgacaagaccaaaggcaaagaaaaacccccgtaccatgtcgtccgagcccatggccgtcgaggctcccactctcacctcggctcccgcggatcgagctcacgtaccccatccgcccgtcagcaatcacagcaacagcaacaacgggaccacgaggaaacgaccgggtagtcctgtaggaaaacgagaggagaatacggtgagtcttttggcctttggaagagtcgggagcgggttcgagaggatgaaggagagctgattcgaaccgattcgatatcaattcgattcgatccgatccgatttcgacctcgacctcaccccctattcccccttttacgatcgaccaccttaatatccccatctacccatcttccccctcatcttttggctacgtccccgatatatcacgcgcttatgcgtccccatggatcctcggccgggaacaccaccacgaccacctcactcgcgatccggccaacccgtcccctgtcccgcctgccccgcccgatgtaggccaaacgagccaaatccagttcgaccgccacacccgctcagagtagtaaacgacgcaacctcgtcgttagcagcgacgatgacgaggacgaggaggatgaaggcgataccatccgtatagacaggccgacccacgggaacgacaacggcgacgacgtccatatgaaagacgcccggcccggaccttccagcccgatcgctcaacgacctagacctgtcaatccggacgcatcgggtcatgtccatacgacgacgacgacgacggcggcggcggcgggcgcgagtggtaacagtaatggcagggctaaaccctcttcacggcaggtggatcttcatccacatgggatcccgcctacgatcgatcaggacggggtgtcctcctcctcggactctgacgacgacgtgccgttgagtaagcgagctaggaagccgacgacctcgacgacgacgaccaagcccgcgtccaacggtcgacggaaatcccaggccagctcgagcgaggatgaaacgccattgagcgggaaagccgcacccgtccggtccaacggcggcaagtcgctgaaacccaacaagggacggagagcagggtcgtcggatttgagcgaggacgaggcggcgagttcggacgggtcgtcccggtcggcggtgtcgtcttccgaagaagagaaacctctggcaaaagtcgtgcctaccaaaaagaaacaacccgcagcgtcgacgtcgacgtcggcgtccaaaaagtccaaggctgaaccgaagagcaagtccaaggcgaaagccaaggtggtgagcgagagcgaggacgaggacgtcaagcccaagatcgggaaggcgggcaagatcagacccgcgtctaccggggtgaaaaagggcaagggcaagcaagaacaccaggatgacgcagaggatgtcaagccggacgtcaaaaagggcaagggcaaggcgaaaaaggaggaagagggggacgaggacgaactggtgagtctgccgtcgccttcgtcgcatatgccgacaacgtcactaatgcgaccgtccctccagttcaaatggtgggaagcggaaaacaacgacgggtcggtcaagtggaccacgttggagcacaacggcgtcatgttccctcccgcttacgtgccactgccaaagaatatcaagatgaagtatgacggtgagtctaccatcgtgtccatggagcggtcgtggaaaagacgacggagagctgacgacccgaggtgcgattcaggcaccccgctgacgctcgatccggaaccggaagaagtcgccgggtttttcgccgccctgctcgaaacggaacacgccgccgacaagacgttccaagccaactttttccgagactggttgaaactcctcaaagaccaccctccggccgaggggatcaaagtgacggatttcaaaaagtgcgatttcaggcccatgttcgagtatttcgagctccagaaggagaagaagaagcaactcaccgcggcggacaagaggcagttgaaggccgagcgcgaagctatcgaaaagccgtacctctttgccacgatcgacgggcggaaagaaaaggtcggcaatttccgggtggaacctccaggcttgttcaggggtcgaggtgaacatccgaaaaagggaaccttcaagtatcgattgaacccagaagatattgtcatcaacatcgccgaatccgcccccgtgcccgtgcccaacatacctggatcatggaaagaggtcgtccacgacaacaccgtcacgtggttggcccactggaaggaaaacgtcaacggcaactcaaagtacgtgttcttgtccgcgggaagcacgtggaagggtcagagcgataggcaaaagtttgaaaaggccaagaagctacaggtcagtcccgctccccacgatgtttatccacagcgcaatcccgactgactcgttcggcccggcggccaacatctttcagcaatacgtcgacgtcatccgaaaggattacacggccgagctcaagagcaagatcatggctgatcgacagcgagcgacggccatgtacctcatcgatcgcttggccctccgagccggaaacgaaaagggagaagaagaggccgataccgtcggctgctgctccctccgactcgaacacgtcaccttgataccgcccttgaccatcgagttgcgattcttgggtaaagacagtatcatgtacgagcaagaagtcgaagtcgatccgcaggtcttcaagaacatcaagatcttcaaggccgagcccaagacgcccgaagacgacttgtttgatcgattgaccgtgagtgcctcgctatctcgaagctggcccgatctgtcgaccgaattgacacttgttcgcctctttaaagacgtccggcttgaacaaacacttgggcagctacatggaaggcttgaccgccaaagtattccgtacctacaacgcttcctatactttccaggaccagctcaaccagctcacacccgccaaggggacggttgccgaaaagattgccgcctacaacaaggctaacaaagaggtcgctatcctgtgtaaccatcaaaagaccgttagccggacgcacggtgactcgatggccaagttaggagacaaggtgagtccgaacggtttcaaacagcttttacgacctttgctcatcgcttcgcgctcccacatctcagctccttgccatcaagtatcaacggatgcgcctgcggtacacgctgtttacattggaccccaagatgaagaagaagcatcccgagctcgtcgacctcgaatcggatctggaagacgactttttccagaggcacgaaaggggcacgctcgaggctaacatcgacaaggcaaagaaaaagtttgaaaaggagaatgccaagtcacaggaagaaggtcagaaacctcagaaggagagcgttctgaacgagcgaattgccaagatcaaggaggaaaacatggagatgatcaaagagaggaaatccaaaaagatcgaggcgccagcacgaggggctgatgctgacaagattctggccaacatcaagaagctggatgaccgcatcgagacttcgaaagtatcgatcgaggatcgagagagcaacaagaccgtagctctgggtacctccaagtgagtcggctttgcattgctatgccacgcctgccaaggacagccatttacagctcttgcggttcttctttctcttttcacaggatcaactacatcgtgcgtaaccgtcttgtttttcacaacgagatcaaccatttgacacaccttcttatcaacaggacccccgtttgactgtcgcttgggccaagaagtacgaagtgccgcttgaaaaactgttttccaaggtccgcatatgtgtggctacgctttcggtctttaaccgacactgatctggtctgccctacagactctcatccaaaaattcccctgggccatcgccgagatcgaatcggaccccgactggaagttttgatcgctatcgaagtatatccgttctgtagcccgtcgcgaacggcatccctgcgcagcgcgccatacatgtagacctgaagaacacaccaaattgtagctcgacgcattgacagagccccatcgcatgcaaatgcatcatattagcatgcaattcgctttcagtgcggaaaaggcatcatgctagcgaagtatagcgatacatgtacaggatacagtgggttccgagagtcgcgggtcccgatagatctctaatccctcatgcgagctggcacgaaacgacggatcgtcacctcccttacgctgtaccggccaagaagatcgaccgggttctccaaatccttgggagtcaccctctcgtcggaatgtatcgttacgtaacacagaatcaatgtctacacagcaatatagaaatcagcctggatcgcatacaaaccggagcgcagcagatactgaccttctttacctgtgtgttcactcggttgacggtgttcaaccattgccaagtcattgccccgtcatttggcaaagcgaacggtctgtcctgctcttgagtattgtttgcataatggggaatgaccagcagtgcgaatctgagaagcaaatgggttcgaataaagcagtctatgagaccgatgcgagccgacccactcagcatgactgaacacgagacctcgcttgtaaagcaaccaatcgacgcaaaacttgataccggtcttgacgacccatccgagggaccggtaatgatgatacgcaatgtaggataccaagaaagggttgtcaggccgcatcgaaatgtcgttggggatggatcggaggagtccgatatccttgagaggatacgggagctcgagcgctatcctcaagagatctcgaggggggatggttgcgccctttagggatgagtcagtgacacatcttgtctgccgatatatagaaggcattgcttacagtctttgggtgcatcacacgtagacatcctacagcccatgagaggaagaacgcctcttccaagttaagctgtaaatgttcgaaatcctgcacctcaatcggtggcagcgattctcgagcggccttctcttgtggtctctccgtctcggcagacggcttaggcgctgcgatagcctgatcacccatagggacttgtccagtcgtcacaacaacggcagcggggctcttcttcttgccaacccgctgatcaggtcgtgttggccggaccaggaacgtctgaggagtcagcctggtctcgccctcgggtaaagcatgtgcatattcgtccaccgtgggaatgaacgtagagttcactgtcgtcatcaagtttgtccgcgatccggtaggcgtcgatacggaatgagttgaaggggttgtcgaaaccgtacgatgtattgcctccccagctatatctgcggtgtcctccttgattgccgacgagctcgctgttgctttccctgtcaagatggcttcggcagcgagagaagcatctagcatcgcctgagctcggtctttcttgaactgctttcgctctttcctccgcagtgctgtcacttcctctgacgtcaaacctgcagtgcacctgtgtgagccggactgcctccaagatgagtgagacgccaatatcagcactcacctcgtccatcccgttctccctccaaagctttcgcccgtcttatggcccagcttggatcacttcggctcaagttccctttcccgaaaaaccctctctcgaacaggatctctcggtccgctctattggtgacccacaccgaccgggtcaaggggtcataagttccgatgcattccggtcgaatgggcccggtagatgacagataggacttgatgaggtagttcaagcctcgagaaacggaagaagtcgtcgctgctggagctccaggttgcctaggcggtggctcaatatagtcgggatgaaggggtgaagtcggtagcaagatcggcaagggagtcccaaacttctgattgttcgctttaaagcgggcataaccaccgccctttccagctctcggtgcttggttcgtgttgattggagttccactcatgtctgtttcaagattatcaaacttgactctagacaccgaagcaggaccaccgggtcatcacaagctgcaagaagaagctcaatatatcttgacattcggttgaaatatgcgcaagtcgaagctcgcgcggaagcggtttcgagacgtcggtcggtccatctaggtgtaaatcttgatacaggttcatgtctaacgatcttacgggacttgatcaagagatagagggagaaagaggaaggatactcgatactgctacaacgtttaataaaagcgttcattgggacttgggcagaaatgcgaagcttgtcgtgacgattcgtaactgattttcagggcaatctcgttgaccctaaccaggtgttttgtggtttgtgcttggtagtaatgtgggcctagttcctactgcttgacttccaattcgacttcgcgcctgactcccttcatgaaaggctcgaacagagtctggacgtcatccgagctgttcaagaggaggcgatcgtcgtcttcgtcccgatagtagcacttgagcacgctggagactgcaccgcccacgcaggtattgactttacgagccaccttgatcttcagatcttcgcagctaatgtccggggagacagcgattgtgaagacggcctgaaaagaagatctaggtgaggggaagcccgatgggagactgtactcgtctgagcactcacgttcggcgataatactttgatgatcacattttgcttgtagggctgtaacatgtccgtgctcgagccagtgaagtggccagatgcaatcttggcggaatcgggtacctgcccgtcgaacggcgtcttgggcgagtgcgacgacgcatccgagccttcggtcgatccgctacctctgttactggctttgggtgacttgaaacgaggatcgcttccctgatggccgtcactaacatagtgggcacccgggtcgccataatcgtgtgccgtaacattgttgcgcgcgtcgtatactcccaggggcgaagcgctatgcataggcgaagtctgaggattggatgcgtcactcccgatcttgggtaactggtatacgttcggactggaagcgctgcgcattctgagcgagggggtctgagagggcgggggatagaacccgtttgacgatcggccgccaatcccaccgtttgtgtaacgagagtttggtgtatcagccccgttggatctcaatatctcctgaccagcttcgcttgtttctggggtcgttgcgagtgcggggccatgtgagtcgtcagacatgactcgggcaatccttgtaggtaatccacctcgacctaaactggatcgtggcaagctcgaaggattgccaaacgaagcctcagtgacaatggaggcgtccgacgagttcctcatagggatcgggggcatgggcgttgcgttttgctgcgaacgccactgtgccatcagcaggccatttggatcgtcattcgaagacctcgcgctcaagttcgagtaccggtctggcggccttgccatgccggactggctcagcgtacgtcttgacacgtacggagtactgcttgcgctggtactaggtgtaccaccatcatcgtcccaaccggccatgaccgtgtcacgctcaaagtagccgccgctcagtggtccggtcgaaggcccatcggacgcaggagttgccgcgaaattggtggctgatgaaatatgtcgtcggttggcgcctagggatgagtggcggtctatgtcccgcatctcgcgccgcttttggtctgcagccatgagcttggtgatagctgcctcccactgagtatactgttcggaatttttcacgtgcaagacgaaactttcgaactcgttcggattttcttgttgtcgccagtatactgaaagagcgtattctcctgaaaatacacttgaagacattagcgctttgatcacctctgtttgaaaatcggtcgtgcctcaccatcggcggtacctttctgcaagtgcgttaggttattaacgtagatacggcccttcagcgaaagcgggttcttcttgggtggaccggaaacgtgcttgtcggcgtgttgttttttgagcaaactgccgctctttccgctccgcttgtccttcttgtccggcaaaatttccttgcaacagagaatcatcttctcgaacaggtagacttcgtaatcacgatccaggtctcctttggtgaccatgaagcgtccttccaagagtaaattcccgaattctgaaatatggtggcccttccagtccttgacacgatattgcagttcagctacgatgctgatattcgagttctggcggatagtctcgttgacgctctcagcgattcgttttgtgacctcgtgtccgctgaccaactcggccatatgaggatagtctttgtcagacgcgcccttgatcaatgcctgagataggatacgaatgagagatctggggcgagagctaacacatatctgcttcaagcttacatcaagcaagatcgggtaccggcatatccgctggataggtatgataagataagcgttcaattctgccaccgtcaacggtagggtatctcgctgattggacgcagagggtttcgtcagatgccatctcagataacgctcgaaggacatgactaacctgcaagttgggagtctccttttcgaccaactccaatgcgttcatgtaattcgcacaataaggctcatacacctcgaaatctttctcctgaagtcccgccggcacattgatgtgagctgtgtgcgagctgtctctgacttgatttacacttacaaaatgtgcaaatgggtatccccagttaccctcgagccatgcactaccccccttctccaccatgggctcgaattcggtctcgaggcagatcaagaatcgtcgctgtgaaggaatctgatcagtcagaaagcgcgatgatggaccgtcgtcaccgccggccacttacctgtatatcgataagcttgcccaggttggagaacatcatgtgtaccgtgtccggggccacaatcgagtgttgcaacaacgcttgggcgtaggcctagtcacaaacgtctcgtcagtattattccgagctgtcaagttcacagcaaatctaacctgtaagacctccaggtccgagacgtattttttctcggtccttaagatctcgccaactgccatcgctccggcgtccatagggccaggtcccattcctgtcatagggcccgcccccgcgctcatgtggcttcgtggaaagctcttgccatcgaatgacgtattgatcgagagcggttgacggggtatgccgctacctgagcccgttttctgaaactgcgtggccatcgacatgttggacggcatttcgcggagtgtcgaggtggaagagggagaccgccccatcggctgggattccgaataatggcgaccgtgaccagatggcatgggaggtgcactggcgtacgaatcatgcaccccaaccacgccggtctgatctccgttatgcggcgtgatcgtgctaaacggcgtagcaggggaattgacgtcctcctgtacccaagccgagtcaggcaatcgatcgagcagcttgatgaccgtgtgtagtacccgcttcagtccaccggtgtcctccccgaatagctccataacggaccacaacggatcgtcctctggccatcgtccactctttttcagctcggtcatccgcatgataaagctagccgctccctttttacacttttttaagtggtccttttcccttgcccaagcgtatacacctttgccctcggacccttcataatcaaagttgggaaactcgatcgagatcggcatgggcgcgtcataggtaaagttgggtaggagcatgttgaaaaggtggcacagggacgttccgagtcggaaagattgccagacgtgttgcatgacatccatcttggggcaacccgcagggagttctgtcgtcataaaatcacgcacaaaggcaggtttcgggtcgggtcagaccatgccccaacgcggtatccgtagatcaagcgagaacgaaggctcacctatgaaccggtcgtacccgttaactcgtctcagccgtcgacgagtctcggaacacatctcgaacatggtttgaggacctgccatgctagccgtcttagccgccagcgtgttggtactatagagatcaagaaaatacatcgatccctctcgtaagagcccaatcttacttttcccatgaacaggctgccgctagcaaactcacgtcggtcccatctgaatatccaccacggtcgtcccgcttagactgacgttgctggacatgcccgattgattcgccccgataccaggagtggtcaatccgggactcggggacccgatggtcaaccccgcaaagtcggccgtagggagcagaatgttggaaggggcgtgcgagatggaccctgctttccgacgagggatcgacatcctgagagaagtagagaaagtgcttgtactgctactgttggctgtggtctgggagaataaagtctttgatgacgattcgtgataaagcgtgcccgggacaaaggtttgtgaaaggtccatgcggatagtcactgatccggcggcttgatcgacggcctacgagactgatgtttctcgtcggtagaggtccaatgaatgactttgtcgagcaaacgttgattctagaagatcaggacgtccgtcgtattcgacagagcgactgatcctctagctcagatgatcaagcgaggttcgccttgcccttcaggggatcgatacttgctcgatcagaaccttgggttctcggcagtttcagctctcggccgagaaggtgaaagctagggcaagtctacgggacgatcgagagcgagaaagggaggtcccgtattggccgggagattcgccggttcaggagctggtgcgtggtgatcgagtatggcggcacgttaatccggtgtcaagggaagaaagtatcgagtggggacagtcgtgaaaaggtcgtgtgatcggcgacgaaagggaggtcgagctaggaagatccggccgatgttgtcgatttgactcaagggagggtaggagtgatcccgtcacttagtaaaggctcgtgagagtcccggattcgagcaaagtgcgatcgaaaggattcgaaagagagcgccgagtgttcgtgttgcggtggtggatgatcagcggatggtttgtcgaccgcggtgcatgtgcttgtcgtgaagatcctgatgatgatgcatcaatgtggattgaggaggatgatgactgccgagcgtctgtgtgcccgtcgagctgcggtgtctgtggcagttcaagacagttgcctgtacgtcgttgccttgtgccaacgtccacttgacgagatacgagataacggcgatgatggttcgtctctggatgatcaattcccctgatgttggtcgaatttgcggagaaaccaaacgatcccgtgctcctttgcgtgttttgcgtgctaatcagattgagcgcggccagcgactgtaattgatccgttgccctcgtgatgggactgtcgtatgattctgatgaacagatgaacagatgaagagttgtgacgctcacacctggagtctctttcacctcgacttttcgctgaaagacaagatgaagcagggcacaatgcagcgagacccttgtacggtcgtaccgtcgagtattcctggaagttggtcggtcggtctctacgaaattgatttcctcccggttacaagcgaaggcggcggtaggcagagcaaggttaagcagggagaaggaggacgagggcaaggacgggcgagacaaatagcgcgccaacaaaaagagagcgagctggcttttaccgaccacgctcgatccacgatcgatgggcgatgggaatgttttgttcccactctttggcccacaatggctgatatggctgtcgcgatcttggtcgttggcacaagcgaatacagatgtcggaacgcccgtacaatcgttgcgaacaaccggacgtcggaggtgtttacgtcgaccgagggctgacggctcgtgaatacccttcttttccatgaatcgtcatcgatagatgcatcatatcatcttattcatacctccggtaattcggctggaaacgaacgaggctcgcgatcacacgaccccgcgaaacctctgctccccgaatcttacctaatagcgaatatgattccaggtgaaccagagcgcacgcgtgtgtgcaccagcaagcaagcacaccggacgagaaggggtgcggttaaaggacgagaataaggggaacttagggaaaggcgtagccctggtctgcgaacgtcgagtgcccctgaccctcttgatatggtttgcgttgagcgagcgccctttgacaagcctcacacttcgtccacgttctgccacctccagtctcccgagatctcatgagtgaaattcgcgttttaattccaatagactccagatcgaccgcgacaaaaaggacgaggactccccatctccccttcgccctctgggcctgacctggcctgatgatcttcgacggcacgcatggtccagcgccgaagccactctacgacctcggcgtaaaaaagcccggggccagcacgagcgacgcgcgggcaccgatcagaaatgcagggaagccttctttccatgttgacgatctcgagagattatagttcaaggtaccacgtcacgcacacaccctccacctgcctgtttgttcggcgaggctcggacctgacgatcagtttgtcgcttttgtcgcctgccgctgcttaataaaatcgatcaagaaaagaggctggaaaatggaacgcaaggcatacagcattactgtgctatgtggtttccgagcccggccgtgggtctggtcacctgtattctgcttaccatgagattgaggaatcagcaatgggcaggtgttccatcggataaacgagcgtgagattggtgacagatggccataacgtgcgatcgacgtatcactccgacctcacagaaccgcggttgagcagccgtgagatgtcgacaaccgtcaaaccctgggcttgctgtgcagagcgggagaagctggcccggcgatcgaaaagtgacgaatctcacgagttccatcttgcacgattaggacaagtcccgatcccggaagaagatgacaacctcgggggaagaaaaggggctagccattccaggctggcaggggcggaactttcgacgtcgtcggtccagcttcgtatcatcattgcatcgacgctagtgcgcgggaacaccgaggagagtgcagcttcgaccgttctagcaaagacgccatgaaactctgaattatagggtcgtcaagtcaccggcacaaaagccggtcgatgtacaagatctcgagtcggttacgatgcgggacccggttctactactgtccgagaatcacccgcaggtcttgttgtaaccgggtcggagcaagcaagagtcccctcgatcggtccgactcgcctgctgaattatcagctcgtactgagcacgtcttgcaacttgcccagctcgtctgcgcctgctacagcttggacttcgttcttcatcctatcgagttccatcttctcagcatttgccttgtccacctcgcccgcctcgcctgtaccagtcccagctgcagcggaagcagcccagttgagataggccgctcgaccttgttcccagatcttgctctccgggccagagggggtgtttgggtcaggcgaggtccgagcgggtcttggaggcggcacggaatccccaaagggttcgagcttggtcgacaaggtattcaatgtcttttccaatgcatctgcagcatgtggcaacggtgcaactgcagattgtactcgcgactttagcttcagaaatccgaacgacatccggatgttgatcgacttacgacccgcttcctcggccaagtccagcacgaatccagccgctttcttctccaattccaaccccttgacctgtttatcgagctttttattggccaaatctagctgatgtttcagtttccgcatctattcaacgaagattcgagtggggtcaggacagaggcggaggttgctgtgcaaacggactgagcttacctctacgacctgcgctcggaggtcatctatcttcccttgcacctcagcttccccttccctcaaagaagccacgaaattcgctcgatcaaagtctagtcccttgtgccagggctaacaaagatatcatgcttgtcagctaccatcattttatcaacgtcgagagcgacggatatccattgtgatatgactgaccagaaccagcctaaggtcctctgggatcgcaaacgaattcctcaagcaccatgcgatgaaccggtcaaacgccttgtccatgtgcgattcaagcagagtctcgagtctgtatggaccttgatcctgaacgagttcgcgttggttagctccagttcaagcaggatgattcgagaggaatttcttctcaccatgtcggcaaactctgcttctgtagtagcttcgtgcttgctcgagatccatgtgctgaccgatgtgacgatgttgtagatctctttccggcacgcgtcgctgatatcctccaccacggttcgagggtgaaatcccatcaactacaaataagggtgagattacttgtcagataccgacagaggaatggagcgctcaggaaggctccgactgacctcttgcagcagcctgctcttctcatccgggctgaggccttccagctctttacgctctccctgcactgccttgttctttcccttcagcgtgctcctcctggaggacgatgcctctgggatcccaggcggaggaggaggcacaaagtaaggtgtgcatgtcagggggatcatatcctcgactgtcttggcctttttcacggtggatggacgtcgggcgatgggtttgacggccgtcgccgttgcagtcgttccagacgatcttcgtgtcgctggcatgattccgaacaagttttccgtggtttcgctatcgattgcttgttgctttgataatgtccaggaacttaacgctatagatctgataaagcggtggtgctggattttcgagacgaccttgagcgagactgatacgttacggtcatgagcgagcgaacgactctggttgcttgttgcttgttgacgtttggtttgtttacatcccatcaataacgagctatcgcgaccttcaagcggcccagccccagccaagaaaccgaattgagccgagactttgagtcgaccgcgccataaacgattcatccggatttacttccgacaagtgcgacttcatcctcctcgtcttgaagttgcgaaagtgacattacgattcaggttagctcgtcgacacgtaccacctagtgaagactgacaagaacgaaaagattagaggctactgtgatctgatatccctggatggtattcgaccgataagacgagctcggagagcttgaacgaggtcgattacacggtagacggcggtctcaagatgagactgacgaaaccagcatgggtcacccattcaggcgagtctgacatcgagttgtcgagccgctacaggcaagatcctcgacctgacctcggctcgaccatacagatagcaagaagaaacgaaatcccttgtttggattgcatgtccatccggactgttcgagattggcaacaggaggaatcggtcggtctccctgtccaccctcgctccagctacattcttagctgatctctactcgactacacgacgtgaccagatgccaagatccggatatggtcgacattgcccatcttatcaaaggaagcggaggataacgaagcgaatcccaagttgctttgcaccctgagcaatcacaacggtgagcataatcagtgatagggttgccaaataggtcacggcctgatagtttgcctatctcaaaacaaaggacccgttctctgcgtgcgatgggctcatcacggaagattcttggccagcggatcagatgacggaatcgttcttatctggaacctcgatctgtgagctcgagtttcagactggctcacggttgccgaactgatacaggccggtcatgagcagatatggcgcgggtaaagttttcgggtcggaagaagtcaatgtcgaggcttggaagccgctaaagcgacttgtaggccatcagtctggtaaattttggggtatttgtcatactgcgtattgacatggctgaccgagagggtctgccttggtgtagatgtcgtggacattgcttggaacagggacgattcgatgatcgcctcggtcggcctcgacagtaccatcttcatctgggacgggttcacattcggtatgtagagcaaaccccctatttacagacaccgtcctgatgtggacccgtttcgtagaattgatcaggaagattgaagggcaccaaggattcgtgaagggagtctgctgggacccggtcggccagtatctcgcaacacaagtaagattctcaacgatgccgaggtggaatctatgaaagcctgatcttacgattacctttagagtgacgacaagacggtcaagatctggagtactcaggactggtcgtgcgtagacacggtatcaaagccattcaagaattcgccaggaagcaccttcttccggcgcctcaggtgagtgccgggtgttttggacgcggtttccagaaagctcacatcaattcgagaaatgttttctagttggtcaccggacggggaatttattgcagcgtcgaacgcgatgaacgggccgatctttgtcggcgcagtgatcgaaaggcaaggttttacgagcgacatttcttttgtcggacatgagaacacgattcaagtggcggtatgtcgagcgactcggctcaggcgaacgagttttcgctcacacttctgtcgacctgctcgtggtaggcattcaacccactcgtctgtttccccctgggccagaagaaggacaagtcgacggtatcgacaatggttgcattgggggctgatgacagttcgatttcgatctggcgaaacacaaaaagtatgcccaccctcgtagcgaaagacgtctttgataggcagattctggacttgtgctggtaagatccaccgaggatccccatcctttgggtcgtgctcactcaagtactcgtttgttcaggtctgctgatgggttggctgtgtatggatgttcttccgatggaacgatcgtcgcaatccagtttgatccttcagagcttcccgatctcggtacagcagaagacacgacgagggttctcgaggccaacgagtggagacccacgaaggtcagcagaagcggcgcgatacaccagcaacaagtctcggcgagacagatatcctctcgtgtttcgagcttgatatcctcagctaccccgaccaagggaggcatcaattatcttcaacctcgtaagggagcgcagaagctgtcgcgggtaacagaagggaagagaaggattcagcctgcatcaaacctaaacgcggccaatactgccgtcacccgaccgacgcctcaactacctatctcagctccgagaaccccgggaggcgccgttgacgtgtttgccgcggcagccgatcaacccctcgagagccaatcaaacgtcgttcagtcaagagacgatctcattcagaacgctcccttggcattcgaggacgacaatatgcagcgaggagaaaagaggaagaagtctatcggcgagtacgaacctcccaatcggcaggtgaaatcgcggaccctgggcggaggagagcgtgccagggacactggccctgtccgcgaactgagaccggcgatgcaggagattatgagcatgggttctgttgctgccagccgactcaggctgcctttgcccgtgatccagaccaagatcagggtcaagtcggaggacgacgatcttttggctgccgaggccgaaaactctgatgatagcaagtcgatttctcattcactctcaccttttgcgaaatggagaagttaacattcgactttttaccacagaccaacctcatcgggtcagctatgttcagaagggatctgtccagtggctagattttcccgcgaaagccgtggtcgctcttgctatcagcgcgcatggcctgatttgtgctacagaaggtggtaccgtggtcgtgtatagcccggccggtatcaggtaagcggccattcagacaagatagtgtccgttaggaatactgatcatcacatcaccacaggctcgttccggagcacaaggttgactctccggtatcctatctatcggcatccggcaaatatgcgatggtcgtaacatcgagtggtaaggtgtatggctggtgagtgcgggaacatccagcttgtacactagcatcctactcacctcagtttgcaggaacatgctgtctcgaagagccgcctttgctcctacggatatgacgcatcttctcgataccgacacaagcattcatacgaccagtatccgcccgaacggtacaccactcatccagctcacgaacggagaagcttacgcttacaacgttgaatcacaagtctttgagagcgtttgctcattgtggcacgctgagcattcttcttattggacacggacacgggcatcaagctcgaatccaaagaacattgtggcctatctcgaaaccgccctgaatacgctccgacccgatatcgttgctgcggcagagaccgctggtgcaaaagtcaaacctcgttggtttgacgatgcgatacccctgggacatctcgagacgaggttgcaggcttgcgccctgctgaactcgccgaatgaatacaagacgttcttgacctcgtatgctaaaaagattgccgaggaggggtataagaacaaggcggaacagctggccagggatctatatggtccgatctcattgttagttgtcacaataggttgcaatggatcggcgctgatcgatttgtcccaatgcgactcgacagcggagcggccaatcatgccgagtacaagccgatagtgtgtggtttgaacaaaaaggaccttttgaaggacattctcagcatattcggtgggtcttcataggccttcattccaagacgggcatgcacatgaggcacgaatgctgaactgaatgcacctttcaatcaattcgcaggcaagacacatagtcttcatgaagtatcaacagtttggcaggaacggcttcgattagccgctagtgagggctgaaacgaggtcctggacatcgggatagcgttggcgcgggacttgatgacaccgagaacgaagaataagagtttctagcgcacggcgcacgcagcagtcacaggttgaaacttgtaaccataagtgaacacaatgaaagtcgatgtttgtgtgcggaccctaacgatcggaagccggactcaccctcagtgatcaactgacaatctgcatccgcggacctgcgcgagtttcgaaagtcttttgttcgccgaaacgaggctcgagcgcgtacgatatcttttgtcaacctatcaaccggttcgcttggctgattatgcagatcgctgcaaggggaaatcgctcgcatctcggaaagacgtcggttggtgtgtgactgaacgcccgaaattcccctgctttgtctcgtgtgcagtctgctcgggattcgagcaggtgaaacgtggatgctttccgtggccgccttgccgcgacgctcggtccgaccgaacaaaaggatattcatgctgcaaaggtcatccccgcacaaatctactgatctcggccgtttcgaccccctccgacaagtcccgatgggtcggaacttgtacctcttaaaagtccttttgtgaacagctgaacagactagttccgcactaaaatcggagcgacgtgttcctaggtcccctgcgggcccgacgttcctcattcataccaagggttctgtccgatggatcacgattctcccaagatcgcgaatctcgaccccgcatactgaattgatacacctttatagcacagccattggcgactggccatcagccggatctgaagcgttcttctgtccttaccatattgcccagattatactctagtcccctccttcctctcgttatcactctctcccggagcttacagtgttctgctcgctagtcgatcaataccacctttgaaacctcttgcccgaattcgctcgttcaagccaagccgatctgctttctctctgctcgaacttgaatcggtaagctttggaccaggcgacgatcctactcttcggcttgtctctgcgtagtcgaaagaacgattcccggcgagcgggtagaaactcggccgaaacacgacgcgaagttccccttgtccaaggtctgaggatctggccgaggtgaaaggggaggtgtcgacagactgaggaaaggcaaagtttccccgagctacaggacgaaaggcagcggaaatctcaccgaacgagtttgatcgtcccagtcgacaagaaaccgtaatgctgatcctgcggttcttatgctttctctcctttgcccgttcccccttgtcgtaaatcgtcgccgtcctttgggttctgccgatctccacatgcggcgggtcggaattccatcacgtcacaccaaaacatagcaaagcgactttgcaccatcaatccgatccacccctacatagtctcgaccgaccgagacatcatcaactttgacgacgggctcgatcgaccttctcaatcattggaactataacgaatctgccggaaagctcgattctctttgaagggacgactcgcacgacaccaagagaacacttgcacggatcttgacctggcgatcagttcagtcggactatcatatcacactcgcctcaatataaactgatcagaatgggctgcaccacatcacaacacgaggacccggccgcgaaggctcgtgagtaggaagcatctcgacacagttatccgggttcatctcacgatttctgttcccatgatgatcaggtaacgaggctatcgaatctcagctcaagagggaccggcaggtcttgcaaaatgaagtcaaggtcggtgcaacttttcggggcagatctgactgtcaggatcaagctgctgacaagtctcacgaccgtgccagatgctactcttgggagcgggagagagtggaaagtcgaccgtgttgaagcagatgaggctgattcacaacaggtaagtcaagtcgaccgatctaccagtacgtactagcccatgctgatcgctattttgtgttgcagaccgtacgatctggacgaacgagaatcgtacaaagagatcatcttcagcaataccgtccagtccatgcgcgtcttgctcgaaggagtcagcaatatgggcatccagctcgatccaagcaaccgaggccggtacgacttggtcatggccagtccgtctcagatcgagggggacgtcatgcctccgactctggcagatgcggtctacgggctgtggaacgacgctggggtgaggaaggcgtaccgaagaagaaacgagcttcaaatcaacgacagcgcgccctagcgagtccctctacctattccactcgcaccgcaaccttgatggacggctcatacgatgatttgcgaattccagctatttcaactcgatcgcacggatcgcagcgaccaactttacgccgactgaccaagacatcctgcgcgcacgcgtcaagacgaccgggattagcgagaccagcttcgtgattggagacttgacgtacaaattgttcgatgttggtggccaacggagtgagaggaagaagtgtaagtgaagagtcacggcaagatttaggttgaaaagggtgctcatcagtgccggattgacgttagggatccactgctttgagagctgcaacgcgatcgttttcttagtcgccatttccgaatgtgagttctgtaacctccctatctccaccttctgcaaggacatcgtgtattcacgaccatagttttgcagatgatcagaagttgtacgaagacgagagcgtcaaccggatgagcgaggctttgaggctatttgattcgatctgcaattcgaggtggttcacccgaacatctattgtgagcttggcactgctcaattgaccggaatcgaccttgtggactaatgtcttcaaccgatcgtcagatcctctttttgaacaagatcgacatcttccgggaaaaactgccagtatccccgatgtcgcactatttccccgactaccgcggcgatgacaatgactacgacgcggcgtgcgggttcctgctggacaaatttgtagacctgaatcagaatctggacaagagtatctatgcagtaagtttacactgctagagggatatacagtgtggaacgttgacataggcattcatggtcatagcactatacgtgcgccacggatacgaaagccctcgccttcgtgctgagcgctgtcaacgatgtaatcattcaggcaaatttgcgggactgtgagtaccaacagctcattcgatcatatctcagcaacaagtctgctgaccatgatgaggttccactttcaggcggattgatctagttttgccctatcccctttgcacctcttggaatatcggacgctgtactcataatcccttccaccttacgagcgtcgtttctttggcgtttcaagccatcttcacattcggattctgttgtcttgtatcagttatgtggctgtgtgtcctctcattatctagtgtctcggctgccgatgacggccgagctgtgcaacgcttcaaacaaaagaattgtcgtcccaagctgaaacgtcacccttgacaacgcatactcgttcccgctttccctcctctcttcatacaaagtggaggtctcgcccagctagatactggaactggcaccatcagatcctttttgttcgttcgttccaaccgaattccatgatgcccggactagtatatcagatcaaagtcccgaatcctgatccgggtcatggatcgataatcatgtaggaccagcttgttccgggctgcaaggcgacctcgacgaccaaacaacttgtctatacctacaccatgttctcgctctcacgtcggatcggaacctcagcccgctcgaccagggcgatcggcctcgtccggacgtcagttcggaactttacagcatctgcagcctgtcttgccgcgcagtccgtggcgactcgaggcaacatgcagctgcatcgtatcaaggaaatgctcgagagggtcgatcagacaaatagacccagcgggaagatcgaagtcgtcaagcagtacgaggacgttcgtcctgtcctcgagctgtgagtgccactcagacgtggatgggatcgacaagtcggctgaactatcaatctgtattgaaaccagaacatacgatcctcatgtcaaatatcacgtcaaatccagctcgatcattaagcacctcaccaggtacccggaggaaatcaaccgtacccctgaaattgcggcatcctctatattcatacccggagaagaagaggagcctgctttctatcccacagtcgagagtctccttacagcccttgaaagcagggacgccaacatattcgacatcctcgcgtttatgaacaagaacggcgttttcgataccgcaaggacagtccaagatgtacagcgggcaagcgaagttaggggagcacagggactgtcggctttgtcggtgtttctcagagtgatcgataaagacctcaacgtcggcttcggtcccaagcttttcgaacatgttggctggactccgctagtagagtgagtacgatgtgtcaacagccggccaaaccgaccggggctcactgcgtgtcgccaaactatatcagcgcccgacgtgcgatcctgcagcatgccgcattcaatgggaccacgattagcggcgagccagaggtgccactcttcgacatggcgcttcccgacacgatgcgtatcgagccggcactgggcaagactgtcctacaagaggatgtcgccaagctgtttgcggaccccaatggcgcgcaatggtacggaagccgcaagctcgacggcgtacgctgccttgtcgtcgttgacgtagcgattgaggagagtgaaacctttcactcgagcactgtcaaggtcacccgggccaaatgttactccaggacaggcaaggcctttcacgtcctgcagcccctgcttgacgacattgaaagggtgtgcgatgactggactgatctgatcaagatcctccagagtgagccatccctcagcgaggagagctatcaatacaaatggttgaacgggatctttgcggagaacaagcgcttcgttctggatggagagctttgcgtcttgaaagaatccaaggatgagggaggagttctggtcgaggactttaaagaagtcgtcggaaaggtccgacggaaaacgggatcggcagatgacattcggatgttcatcctggatatgatcccatggagcaacttcgatcgacgtagccagggccagggcgacttgccaaccgagtacaaactgttcagcgagcgacaacaggacgtcgaagcaatgttgctccggatggacgagctgaccgtagaaggcgaagatcaccacttgctgtggctcatgcaggagccgatgaacagccccgaggaagtcgaaggactcattgcctcggcctcagacggaggctgggaagggatcgttttgcggagagatgtggcgtacgagggcaaacgaacgtgagcatccgtcgttgttctccggtcacgctcttgtgctgaaggcctgcaatctcgcagagcaaacattcgaaaatacaaggcttggttggatgcagaatatgtggtcaaagacgtcgagatcaacacgatgcgcttaccggtcgatgggatctacgaggatcgaccggctcttgccagtctgatcatagagcataaaggttagtatgccagatggaatggtacacttggcttcacatggctgattaatctctgagggaataggtgtgatggtgaacgtcggcagcggattcacgaacatgcagcggatagagtttgccaaagatcccagtcagatcgtaagttcccagcgttcgttatccgccccttagacttgacttacatgatctatattcagatcggcaagcaagtaacggttgaatactttggcgaatccacaagcgatgctagggacaagaaaggcggggggatgagcctgcgtttccctcgcataaagcatatctgggagggcgagaaacgggatgtgtagcgagtcgagctggtcgtgatgagcgcctgtgtcatccaggagggaaagtattatcacgatatctccagtagcattatatgtttgatacacaatcaattcgtagtgatccggttgaatctgttatcaattggtccgggtcccgtctttgtggcggtctcaagtcgagatgagggcacctaatcgggtctcattgagatcgcttcatcaccaatcgcctttttctggcatagcgttttctacccgtcagctatctagctttcgtcgtgtgctcgagtagtgggccctcctcgtggcgaacgtcactgccgctgctgctgctgctgctccttttgttgaggccgttgttgctcttgaggcggttgttgcgcctgattgctgttcatggattgggcattgctgaacatgccctgcatcattgggttcatcccgagccccatccccatccccatccccatcattcccatattcatcatgggaaaacccatgttcatcatcggcatacccatcatgcccgggttgttcatattcataaagttcatgcccgagccgttcattttcatggccggattgttcatgttcatgatgttcattggattcatcgagttcatcataggcatcgaagttggatcgtgcatcgccgtgttgatttcggctgtagttgccatgctggccatcccttgattccgacgattagtcatcgggattggactgaggatcgattgctgatcgtgttgtcgacctcggtccgtgcggtcgacgtgtcccggtcgattaggtagtcgatatggttcacccccaccccgttcgcctcgtatcggcgactttgggcgcaagttgtcgatctctggaaaggttgtcgtgcaaagtgggagcagaagagcttcagttcgtgcgaaaatatgcacagtaacttctctacccaccttgcgtcaatggcaggacgtatcgtcccatgtcgtccttgttgccttccaaccagttcccgtatctggtcgggtcaaaggcctgtacagagtcgtccccctcgatcacctcgtctggaccgaccgtcacccaacctcggcgagcttgatgtgcaggggcaaagaggtcgagccggcgtgcacctaaacaaaagttttcgatgatcgagtacagctgaggtggataatctggctcctccgggtcgtctgggtctctttcccacacgataatgtcggtatctgtatcgatattgtcagtcttgcggtcggaaactatgaccaggcaacctgtccgacgctaaggtccgaaactcaccgacgttgcaatggacaaaccagttgtccgtctttctcctcaccgttcctcgaatcccgacaaggcagtgttccttctgattcaccaacaggttctgcggcattgcgtcctcttcacctcccgccgtccagcctgccctgccccgcttcttgtcgccctttcttgtattcttcttgatccacacgatctcctcacatcgcctgaacccccacttcaacagcgcttccctgcccctttccaacccgtccgtatcgctcgacccgacccagaggaagacgaatcccggatcactgctgatgagccgtatgggcatcgcgatgatctctggccatgtgtactcttggggaggccggatgagaacgacgtcgaatacgtgtggggcgaggagcgaggtcaacgagcggggcgattcggtactcgggtccagggtgatgtataggggaggatgggcgtgatcgtcgcatagtgagcttttgaggtcttgcagcttgcgtaacttggggtacctgtgcgtacaaatccgaaaagtctgtcaacgtcatacctggagctggcgggacagataggcatatcacccactctttacattcatcttcccgcgaaaccccctgaagccaattcccgttccactctcccgagacgatatactctacgaggtaatcgttccgaatcgtctcttctccctttgaatagttttggaatcgctctatccctgtcagctcggtcgaacctttcgagtccttgacaggtttgtcggaaggggtacgggggagaaggagtcgacgtcgtctcgctcgacggacggcgatgtctgcgaggaacgttcgatgctcctcgaccggattcgagtgtgccgtggatacatgctccgacatccttaacataaggataacctcgagagtaaacctctgctccccttgttgcgtgttccagattcgacgtgaaggtcgggccgggtcagaggtgtcctggttttcggtagatggagccgtcggcctcaacaggtcgacaacaaacggctgtagtccaatgaatttttccttacacagacgcaggtttcgcctcccgaactgggtgtgtgtgtatgactgaatgaaaacccggagacgacacgtacagatatgttcgtttcgcggtgttgtccagattattcgactgatagctgataaaggccgaacctgttcacgtccgcccaggaatttcgcgagtcgagcggatgcgctgatgaaaaggaatacacttgccttgacaagatcttgacctcgaggagacgctcttcgaggtatgcgacttatcgaaggtcatgcagtgaactcgtgactctatggcccggctgtttcttcaattgatcaagttactttgcaatgccagactctcaatcggaaggtagaaacaagtacacaaatacatttgcgaaacactgctacctgaccatgacaagcatggcgagaggccatcccgattattctaatagcatgtaccatgtccacaaagtttctgatgttcgccggtccgtcgatatcgatcgtaaatcgtacagttggtcgtatcgagttgttactccagccatatcaacccgtcctttcggcgttggcctgaagcttcaaaccaggtgaccgaccattcgaaagaaggttgacggctgccgacacggtgctgggatgtatcacgaggtacaaacctagaacatgccgttcacaaaagaaggtggttggttgctcgccaagaccctgactgtcaacggctgggcaaaggcagccagcctcttggtctgtctctgtctgtctctcgatcgatgaggtcatcatcttgtttctctcttggattccagtgaaactcgcgtaactgacggagaacatctcgtcgtcgtgtgatcgtaggatcgcaggggtatatcacccaagtacttggtggtcatcgagacgatccaaacccttacccttcctgagttccgctcgatcaactcgaggataacaagacaccatgggtatcgacgtgaaacaattcggaacgacgacgttgtccgctctccaggtcagtactcccggtccgccgtcctggatggcatccgtcacccttttcaataacgagggtggtcattcgggacggaactattatgacgggacattcgagaggactgacgctttgcatactgatcttctctcccgctcgtctacgtttcatctcgtaacacaaaggcctcggtgacggtgctcctgatcctcgggtatggatactttatgaggaaacgagggttcgtcgaccagaagaccgagaacgtgagtttgtccgcagagtgcaactgggaggaagggtctggttactcatggcatccacgatcggttcttgcatcttccattacaccgtccatctctgggatctatctcgactgtcgtttcattgccgacattttgaccaacgacgaaacgttggaaacgttatctcaactcctgcccggcatttcttctcatcgtcaacccgggcctggttctcgacctcgacctgacctcgattccgactacagggagtgagcaagctatgcgtcaagatctttctcccgtgtctcctattctctcaaattggaccgttggccacgcccaagaatctcgaatcttgtcagtatcgcccccattcccggggctgccatacccaagaccggaacgtcaagctcggactgaccttgacggctcctctcatccgtgacctcctcacgtctctagactggatcgtcgtggtcctctccttggtctaccagctcatctcctggttattcggttttatcggggtcaaagtctttggattcccacaatggatcgtgtgagtcccggctcgtcttactttaaaacgtatatatattctcgatcttgttcattgaacacgacctaatccggtgcctcctcctgtgatcttacagcccatgcatgatcttcaacaatgccacctcgctcccgctattattgctccaggcgctcggcaagatcggtacgctcaaaagcctcgtcggggatggtgaggagatgagcgaggtattggcccgaggcaaggtgaggccttgcacgtcacgtcgtgatcggacgcggagttcgaaatataggctgatctaggaacgggactgggcaggtctacttgctgatcaatgcgctggtgtctaatctagtcaggtgagtgcgggtctggaggagagcgatctgtatggtactcgcaagctcacatcctgaatgcgatcgcgatggcggcactcggacagatttgctatcggaccatgtaagcagctcaattgaagtcgggttcacatcaactcgccctgctaaccctggacatttcaccgatctcactacagacatgctcgaagccaaggaggacaacggtgaaccgttcaacccgcaactatggctcgagtccacaatctccgagatccccaaggcaatgcccgaacttcccgaatgggacgatcacactcacggcccgtccaaccctcagccggactatcccaacgttcagccgtacccatcggtagcagagaacgagacatcgcctttgttgaacaagaacaaggccaaggccgtgtcaaagggcgtcttccgagccgcggtcaccctcgcgaaaaaggccacctcgttcatgaacccaccgatgtggggaggtgtgctcgccatcatctcgggtttgatcccatggctgcgacactcgttgttcgacgactctggcgccctttcggccgtggagcaatccgtggagaatctgggagacctctatacatcgcttcagacgttgatccttggtagccagctttacagcaaggcgggtcatcgaccccctgtgggagccgtcgcctacctgttcctctaccgctttttcatcgttactggcgtctcgtgcggactggtcgttggcgcacgcaaaatgctaggggattacatcaagaaggaccctatccttgtaggtccatcgggagtagtccggccggcctttgagattatcgctgacctggactcattggccctgttcaggactttatgctgatcctcgcccctaccggcccgtcggcattgtcgctcgcggccattgtgtccatgtcggacgccagcgaagagacggcttcggttgttgctcagaccttgctcgtcagccacatcgccaccccgctcatcagtttgacggtatctgcagcgctcgtcgtggtccaaatcctgcacaagtagtccatctggcgtgttcgcattcgctctcgttctttttctcgcgtctcgtttctcgattgctgcgaggtcatacccgatacccctcccatcctcctataccgatcaatataggcttgacgaagttcgtcatcgcacgcaatgtacaacagaactctcgttccgggacgcagctccagccttgtaatatgggctacacagcatagaatacacgacgcatcacattcaaggcgtgtcaacagcaagtgacctcaatcagtctggaaccctgcgaccgtcaagagggccgcaaagacgactcgagagatggctgagatctggtcaaagtcgtagttgtccctgatccgatgcagaaagcgagtcgaacatcagaccgctgttcgcgaagaaggtcaggaacctccgagaattctcacctcatgctaaggtcccccgagctatggtactcgggatcagcgatccagtcatttctctcgaacacctgtgtagccgggaaattgtagcccactgcggagaggagtctaggtcagatcgtgtatcccggccgtcttcatctgctttgtatgactggcactcacggaaactctggtgatcgctgcagcacgcggcggtcctaccgacgaccagctcgggggagtagctgcaaatcgatcaaggtcaggctcgacttttatgatcgcaatcccattccgaccccgtcgctcacatctgggacaagttgccaatcaaccagctagcttccggggtctcgatgctatgcgcagcgtgggaaccgacgaattcgtcagtcagggtagacgctcgtccgtgtgaagctgtaggtctcacgatgcaggcaagccgagttgcttgggttcgtcggcctgtgtacggtcgtgtctatgtcagcatgctccgaaatgaagtctgaaacaggaagttgcacgaaataacgcacgactcggtatccaagcatgtccgcttggacttgtaacaacacggtcgcgttctcgctcgacagtcgtcctggtcaccgatcaagtcagcattctgatcgatatcttcggagagacccacgttgatctcgactcgctacttactggcatacgcatgactgcccaataacccttgttcctcgccagcaaagaacgcgaggacgaccggcttctcgaatctgactccctggtttccgattgccctggcgatcccgagcaagtgacccgaaccagacccatcgtcgtccccgccgggcgctcggactttcccgaacgacccacgggaatcgtagtgtgccgacatgatcgtcatgcccgtcgcgttgggcacgaggctagggtaggtacagatgacgttgggagagaatccagggaggaagggttcgagtgcgcattccgcaccggtggattgaacaatctccttgatccagttggcggcttgacgggcgcctccggtgaaactgtgacgcgagacgagttggctggactcccccgtcaaccatcgaacgtcccgaaccagctgacggtcgtccagaccttcagtcaggatgcggtcgatcttgggggaaaacttgaggtgggccgtgagattggcgagattatccacgaggtctcggcggacggacccggaaaaggcttcgagttcgagcttttcctcgagatcgggcaaggcgacgaggctgaggtggccggggatcagggtatccagaatgggcaccaaatcgttgtgcgcggaaaagatcaacgagtgaggcgtctcgtacaatctctctaggtcggaagaggccgcgctgggtacggtggcagtctgcccgttgagggcatgaaggatcctttgtgccgtgccctgagcgaaaacggaatggtcggccagggaatcggctttggcttgaacgtcctcaaagacgcctctcagaggagagtagtcattttcaaggtgaaccttgccttgaactcccgcctcgcccagccaaaagaggcgtttggacgacggggactgacccatctccagcgggatcatcgagccctgtacgagccccgcagccaaattatcaaactcgacatcaatgcacgacttgaccgcaagatagacctgatccgagcctgataccgaaccataggtaccaagcgagcggagacagctggggagatcagagaggagaggccgctcgcgggtgatcaagaggacctgaggttccggggacgatggagtgggtacggccccggcccctgcgatgagcagtggcgcaatggcgaagatcttgcaaagcattctcgacggagggaaaatccaagcctcggattgtgcgtatagcgaaagtgtagaggtgatcgataaacagaggagaaaagatgtggaattattgaatacacaagatggccatattcatcagcacgatgccagcgatcagagacccggcttgatccgataagggatgacgagagaatcacggaagcaattctaacaaccggggatgtaactacgccagtgatcacccggaagcaatcagactcattcatctcgtcacttcatctggcacatcatcaccttcgcgacgaatatatatatatatactcagctcagctcagctcaactggtctcgtccctgtcagcagcttcttagccttcgcaactatttcccatcagacattctccgtccactctcctccccatcaatcaggagactcaagccccattcaacgatgcgacctctatctatcgcggcgattgcgacacatgagacgatagagacagggctggacatggacgatgacgcgagcacggaaagaatagggttaaagaatgtattagaaaagaagaaatgtttgggggttgaagaaacgatggagacaacgaggacttgctgatccattgacgttttagccagatcgtccaattgtatataaaacgtgagtctagcactgtaagagtcacatcacgggccagaaacgctccacacgacatgatggagaccagaatagaacgacgtggccaagaaatgcgattatcgatacaagaagagatgacgtttccacaaccaaaactcaagaactgctgtccaccgatgctttgcgcttcaaggacttcagagggacgacgctgccagtacagattcctcgttggcggtgtcgcatgagcgcatcgcctcgagcaaaccctttcccactgcatatacagtcgattagtcgaaatgcatctcgatcgttgtatcacgttccaaaacaggcttaccaaggacaagggaatggtttagtgccagagtggatccggacatgacgacgaaggtcgtgttgacgcacaaatgcagcgttactacgaaatggagtttttcagctacattctacctgcagtctgtcgcaaacgggcaaacttaccagtcgggtgcagtgcatacgaaaggtttgtcttcgagatgcgtttggatgtggctatggatagcgctcttcctaggaaacacgcgctcgcagtcatcgatgttacatcgataccgcttaacaggtatgcccccgttctccttgtcgggctgcatgaacatgatataacagctctcgagataagaacgggggatgttggactgcgagtcggctgcttgcgagtcggcctgactgtcttccccgttcgaagtctgctgacccacggcatttatctctaccggggtctctgaacgacatttgaagtcgcggacttcgggagcgtacgttggctgtacgcgttcgatttggacggcaaagtgctgggttgctgcgggattgagcatctcggttgcaccacctcgagcgatctcgacgaaagggtcatacggcagatactccgggttcgaaaccgtacgagttcccgagccttcccgccgcttggattttggcgtcttcggtttgggcttgggcccgggtcgtaggcgttttccgactggaggatacttgactcgttgacgtttcgccgctcggtcatctccaccttccaggacggctgccatcaaccccatactcgatccagctgttgactgatatgctgtagccccaccgtaggtggcgcccttgatggtagcttcgagactcgcgttgactgcgaatccaccatcctcacgactctgaccgtgagtaccaaggtaggtctcctggccaagtcccgtgttcataaccggaacataacccgccgacactgatcgtggtagaggcaacggaggctgaagttgcaattgggatcctgtcggatagatgtcgtacggcgaggagacgtgtcgcatctgggatggcgccattgaacgagtcgacgcaggaggcgccgaaagctgcaatggcatctgatagttcacctgatcaccggtcgaccaagactgttggtctgacctggttgaatgggcggtggatggcacttccagctgtgggtttggtgtcatctcgtacggctgcaaaggcattgcgctgaaatcgcccgtcctttggtagatctggaaggcagccgcctgggcagcctgtagttgacccatctgtccatctgcgggtgagtgaggcgagcacatgtcatcggtgagaccggtaaggacattggagaccgctgtctgctcgtgcgacaagccttgatttgaatgaagcgtatctgccatgctgattgtcgtcacgctcgataatggaccttgatcccacatcctatcccttccgtcgacttggatagccaagccattcaacttttgctggaactgatattccgccgaattgggggcgggaaagtattgcgcggcattgggcaacaagcctgctgatgaaggtccgaccaatggcgtcaccagaggagaggggtgatgggtcgagaaatcggggcttggaatggaagactccaatgccggcgtatcgatcgtcgtcccgctcagggcgctgatttgacgatgatgtccgccgatgtaaggctggaaatggtatgcgaatgcgggcgaggtaccctcgctcatcgttggggtagtcgtggggaagagttgaggggaaataaccatctcgccatcgtcaccgaccccgctcgaggtgacaggcctgaacccacccatcctcgccagaggtctcgacgtgaacgcgcttgcctgtcctccgagagtcaaggctgacgtcgacgctgaccgattcatcatggtcccaggacgagatgacatgccattgtaggtcgacgagacggatcgcgacgacgtgttgatgctgctgttgtcaatgacgccggctcccatctggttcatctgctgcatcatccgtctactcgccgggcctggcattcctacatgtcctgtgccacttccgcccaacgaactcgatggcgtgcttgacccaggtgcaaagcttggcaagggagaacttgcaggttgtatggccagtacgggcccgtttggacgcatcgatgagccagagatcaacctgttcatcggtttcctactgctaggtgcgtacccagaccctagcgtcgaagggtacttgcctgaaggcgtcgagttgaatcctccgctagggccactaccggccccactatgcccatctgtcgaggaatggtccaggtagtcgaacccgagcccgaatctggctccgtccccgacctgatgcaagcccatactgacgtccaggtctgtgccgaggtccataccgcttacacccgagtatgaaccgtccccagagagcgatccgtcccaatgagcgattgtcgcggtatcctcgggtcccacgaggaaaggatccgtcccacccgtatggtgcccgtgaaggtgacttcctgccactggagtgaacccgatcccacgatccatcatcatccctgatcccccattcatcttgccgatattggtcttccacggtgttgcgccctgaggagagaccaggtacccgccttcgactccttgaccgaagagcttggccctcatgcccttttggacgctggcgggttcttgcacgaacaaagctgcgttcttgacggtcgaggggacgacaaacggtgaggtggggtcgagcgtcggacgagccggggtgacggagggtgcgataaaggtaccatcaagaagcggactgttggtatacgactggagcggggtggatgaacccgtcccggcagaggcattgatggtattccggaggggagtggtgtgggagagagcttgttgcagctgctgctgctgttgctgctgctgttgcaattgataggacgactgtcgattgcgagaatgaggccgaggagtaatattggccgatcgatcgacgtagatgctcgagattgggtggacagacgtcattctcggcagtcacgctagattctagaggcgagccgcagtgttaccaatttgatggtagtggtccttgtccgtcaatgtagccaagagatgcgtcttgtagtttgcgagacctcgtgggtgattcgtgcgtctcagcaaacggacatcaggtcgatgtcgataccgttgcgatttcggtgcggtgtcgagagagtaggaagcctagtgatatggtgcctcctgtgcggctcgatcaggtgtagtgagcgtagagttgtttgtatgtcgacaagagtcgatagtcgtggggtgtaaagcgagtgtgtggtatcgatagtttgatcgagtaaacaagacagtataggtcggaataaaagagtgtcgtaaaagccgatgaacgagagtgaaactatcctgagaggcgacaagctgagactaaacgagtgtgtggtggttcgaggaagaatcgaatctagagatcctgacgaaacgaattgcgatgagatgatgatgaagactgggtgagacctttgctaggagggatctctctcgatacaatacgacgtcgagcgatctagacgtgtgtgtacggtgagattcctgccgtcacaaacggagacgatcgcatcccatcgaccgagtttgatttcattttgttttggttgattgatattccaccacttgatccactgatcactgaatcgctgcccttgcaccgcctcgcgcgcggagagctcgatctcgtggcgctagagcgatcaatcttcgtctgccctggccccccatggcctctctccccttgcctcgcgagccatagggcaagcgataggtaccgagatcatcaccgacgtcgtcgttgctgacgattgatcgcggaatggccaaagagaagaaaccagggaaacagctacgcagtacgtcgtcgacctcgatacaaagagtgcaatcggcccattgtcgtgccggcggtcaacacctagcatgggcctacaatgacctcggctagttttattcatctggaaggtattccgcccatcttgcccccggccccatgccccatgccgggtcttggccccatatcacaccgggtcatctgtttgttgacaaacaatcacaaacacaacaaaacaccttcggccccgctgatcggctgatgctgatcgactgatcgtcacagtagagtatcgaaaccgtaaaccccgcactcacgtcgccgagagacttggaaaagtacacgcgggcgaacctttcgaggatctaggacgatcattctacgccattgacgacgtgacgttcctcgatagatggccgctctcattttggtccccttctcacatgctccacttgccgattccacttcttactttactactgtgtgccatgaggtgggatagcaaactggccaagtggccagtggtatacccgagcatggatcgatcaccggaccgatcctctcacggaccggaagtaatctaaattctaaacctcgtccaactttcgacggacgaccaaacgtagcccgacatacggcggcagaaaacccctcgccctgagtaaaccttccgatggtcgactctcggttgctttttcctcttgacccttatgaaaagcatatcttaatttagttcaaaaaaagacaaactacgagcgtcagacatgtcgccgtagctaattcgtcaggtactcagccgttcgagctgctgtcaactgctccggggtatggtatgtgagcccagtcttgtgcttcactggcagtgaaggatcaaaggccagaggtgccgccgatacaatggcaagtggaagaaagtcgacaaggtgttcaaacatttcgcttgccgtcgaacgctcaattttagtgtcacgagaagcgctgcgggaacgtcaaatccgttttacagtcgccgcaacgggcatgttggccgacttctctcgttcgtccgccccagatctacggaagcgaacgctgaacatgcagcattatgtgtgataatgatacacacaatacaaaggccctcgtcttcgagcccaccataaagacaggccgtatattcggccctatacccttcccacgtccagacgtctgtctcagaacacagcgatcttgacacccgtcgccaacaacttttctcgcaccttcttgtcgccaaacaagatcttccagaactcgtccctgatctccgggatagtcaggagcgtccggttttctaaggcgtgagtgaggcaagagtcatcagcggtcgatcgtatcaagagcgcgaactgcataagcatcgtcgtactagaatcgcggtacgagagatcgagtaggatgacggtctgttgtcgaatcgtcaaagcgtctggagatgatatatatcattttgtagtcagtcctcgcccgggtccgagttgaatctcctaagcatatcgacataccgctgtcagccaggattttgccgatccggccgggcgtccctgccgcagcccaaatcttggtcgtgttgaggtattcgatctgttcggacgctttaaagtgcttggcgaaaagctgaacggtaccagtataccaggtcatgtcagccaaagtctcaggttgggtgaaagcccgactttccgactcacctttccgacctcgccgggcggcttgcccgtttgagcaccgtcttcaccttcgggtactcggactgatttgagcgctcgaacgacgtctgctgctcggattcctgacggtgacaagacaatgagagaaggtgtccccgccttcttcagcctcttgggcaggttcggcaattctgcaggtatagaagcagatttggtcaagactaggctgatagcccaagaactacctggctacgtacgactgttgacaaaggctggcatcgatcccagcacccttggctcggtaaatgccgatgtcgattgaagaacgttggctgatataggatgatggcactgatgagtatttgcaaagcccgttctccctctggaatctatgagtactcacccggaatcctgagatcgttcaactccatgtcagatgctttcgaatatgtcgccttcaggctatcgtagaagaattgatccagctcctcggtcgtcatttcatagggttgagtagcctcttcctccctgattttccgctgcattgatatacccgaagatcagtcaccttgccaaggacgaaggccgagatggggactcaatggactgacctaccttctccttgcgttccttctctttcagcttccttttctttttcttgtcggcatcggacaaaggtgtcgaaggccccgcgctcgaaccggcgttgctgggtcgttcctccttagcttttcgcttttgcccgacagtctcgacaggtgcctcgctctcatcgtcttcgtcgtccgacaagaatgcagcggcgtctcctccttccatcgggttcggaagatcctcttcgtcgccgttactcatgatggcatcgccctcgttgtcctcctcggcatccgacgcggccatgaaatcggcctggaggtccaagtcatcctcgagatcgtccccaccggtgattgggtcgaccatctttgttcgcaatgtctatgatcttcaggtacaacttgggtgaatctggctttgaaggtccaggcaggtagcgtatgtcaaatcgaccttcgagcgggttaagacgaatattttggatatcaaccttttgatcggtcaactagacgcgcggaagcaaaatgtttctcgcccgatcttgtcggcagtagcggtttggacggctgaacggtcgcacaagcgtagaggctagaggcgacaggcgagaggttatgaagccaaagtaagagacatgaattcgatctagactgcagaagaggccattcgtgcgtgtaagtgcgacctgatgaacagaccctgtttcatgagaggtaccagtgagacgagggggcagcgccgaccaagttggaatgcggttcggttattagcagactcgtgaggccttgatacacacggaacgtttggctgtagttaattcgccctattttacagaagtatcatagtctcgggggtcgcaatcatgaacggtgtcactccaacggtgctattgagcttgctgagagaaaactttatagctggtctggtatcctgcgatgtactgcccgatcaccttgcctaccgccggactcaaatcagttcgcctaaagccatcagacatctcgattgcggcatcatcgacttaccgaagatgaagttggcgacgggagcgaggtaaaaacagaagggaatgtccgccagggctacgtcagccgaatggagaaagctcaacatctgtagcggatggggcttctttccctgcatcgtcatagctgaaaccaagttccacatgcctatcagtttttaacgtttgggtcgcaggatctttgctatgacttacaggacaagtatccgtaaaagttgtgaacaaagtcgtccgagaacccttcattttgaccacccgagacggtgatcagtacctctaggtcctttccagtcgacgggtcgctccaaaacgtatgtctttggtacgtcggaatagacctcttttctcctgcctgaagtttgccctcgacaccatcaatcttgtagcaaagcgctccggagatgacctcgaactgctccacctggtaatagtgatagtggtacggcggggtggtagttgactgttggccttgaccctgcgagatactaatgtgagtcactagaagacagattcgtaattcacaagtctattgtactatcgcttactgtgtgaggacagccagttttaaaaagctgacgacttgtgaacttgccgggcgtatcatttggcacattccacgtcttgaaatctcctccaaaatagctataagaatcgtctttcgggtcaaactcgggaggtatgagcttgggctaactcgtgtacaagaatgtaaatttacggtcacttacaaggtcctagcttgacgtcacgatgagcaaggattacttacgtgaggaaagagcaatgccaaggccattttgttgctctgttaggtcgcctacggacggactgagaagtgtgtctgaagcaggggtcctgattgcaaacgctgagagatgacaaagcgatgtaatgaatactctcgcccgtcgcgatacatgtctacaaattacatcgcggcatctatccacctcttatatcgcctggagcgtcagagggacaaaagcggattcacctccgccgatcgcgtcgcggaccgaaccacgtgactgcttccgcgagatccggccgtgtctttcgtcgataacctgaaacacggaaggtgaagtacggatcgtcttattggctccaggttcgatcgcctttttgacctcagccgccgtcaagagattgtctcttcgcagtatcttgcatgtaccgcaccctttctgagccactatgtgcaaaattattcgagatagcccgccacgagagacgaagggtgattaccgactgtcgacatcgatgggcggccccttgcatttccggatgtcgcgcagactggcgttcggatgcccccctaaaagggcaggtagctccgagtcgctagcatagaagaggggccgacagacgatccgtggaccattcagtgcggaaattgacgtcttcatgcgtgtatgatctcgtatatcggcaaaagctctgcattaaatcgttacaattcgtcgcgtcattagaactcgtacaaaaaggaattgtcgtataaagcttttctgaaggcgggttgttgatgctgtagaacaacaggatcgggctggatcgttggccctgcaggcatagcgagagggtcgtatcctagtggaggtcttccatatgtgctatcagcaaggaaaacgtcaagaagccctgagagattttgttgttgtgtcgtcgggtcgtaacccatatttgctgtggcggggaagtatgacatgctaggaggttgtggcacagtcacggtatctgtaggtctaatccatcctgctgagggattgggctgattgcccgacgggatggtatcgaagatcggcgcaggcaagccctcgacgggaggagaatgtcgggagcgttttggggtgtggtctcgtccgagatccccatcaagtctacttcttttgtgtggcgtaacacttcgagagctacttgtgaccagatcagccagaagttccgtagccgaatccgagccacttacggttgctttcgctgctgttccgctaaacgtgctttgcagagccgaagcagtttgtggacgatggaagcgctcttttccgctccacgccaagtcgtttccaattcgagtagaatattgtaacacgaatctgcctcttttatcatgtcggtagcgagatcgaggtccgtcaaccaactggtacaccgaaggagaatggccgcactgatagtaaggtagtgcaccaggaattgacaatgatgagaagccggaataatctaagtcgtaattgggtgagcgaagttggctgaagtggtgtcacgatggcttacatccttgatttgacttccagcatagatacacccctttgccgcactgatacacttcataagggaggtcgtgtcttggttctgaacgatttgctctggtatgaaaggccgatctaagtgatgattcgggcaagtcaatcttatgccacgcttgctgaacgtcatatggactgacgtagattgattgtcgcagcgaacagagtgatgcgtcccagcatcgccagtaggaacacgcttcgagtcgggggaacgttctcggcaagtcgtacgcagtcaggtagcccctttacccaggcatccatatccgcgtctaattctgtgacgacagcccgaagtccttctgcttgactaggatcatcgtaaccccttatcgactggagggaatgagcatctctctccacctcccccgccagagcgtagactcgagtcaattcaagaaatgctgcgagctgtccgggatcctctactgagacggggtcatcccagacttgcgattcttgacttagctgccgagctagacgaaatacaattcaagatcagttcccaccgatttaagtttacgcatctgtccgtcgcctacgatattccacatcgctgtcaaggaagtcttagattcagactaggtcgctcttgctacaatcaaagcgcccaactcacgaatctgcatcgttgcaagccatcggcctccccgtagatatggacagagcgcggtcgaggccatacacacaccaccaaactagccgtcgatggtctttggctcggctagacagtcgaagacgttcaggactcctctgtgaccatgaagatgtaggtcagccttagctcacagagaacggtattcgcctgacttacgtgaagtcccagatcttgcgctgcacggcaagcttgaccagcgaaaatccaagcctgcgataaagctgagaacaggcatattagtttcgatcaggatcattgttcaggaaggtacgaacagttccatccagccatcgttgatgcgagaagtgcgtaggagctgacgctatgagcgacacgcatcgttgtctttcagtctgtagctgtttagattcaagaagtctggacagagactgactgctcgatcgttaattccctacaaagccatccagtgtgagaaactcggctaagcagaaatctgacattgccgcattgtccgcccaattggcttaccctgtatgataccaaagcaggtatagtgtctgctcgtagacctcaagcccaacggtttgcactgtacagagaggtcagcatagtgcattatggcggatggcggagacttttctgaaactcacgactccagttaagcccttccttttctctcatatggttacggacaacttgagcggtggcagtgaagacagcgaagagcaggcataagaaggtgctgtccgctgcaaaagcaccgttggccctcatggtcatactgtatacaaaatcagttcaatcgggccagaaagggccgtataagacaggaaggactcacgtttcattgtacttcaacatgaaagtgggccgatctatgattgggaatctggagattgtctgtcagaagggagtcgcccttcaaggtgattgagttgggacgcacagcggatgcagtcgagcgaagtaggtctcgaccaggaaatcacatattctgctgtgcgggaacctcgcctgatccggcggaggtctgttgaaacatctgctgcgtcaatgctttgcgatgatgatacgtctctcgaatgacttacaagcctcgcaaatttcgaaattgtgcctgatgggggtacacgaaggttcagcattgtgtgagctacactgtcaggtagaaagagcgccccacccaaggcttgaaatagagctcatctagatcgatggtaccatctgagatcgaatcgcttgctgtcgtgctccggtcattcacatccaaagagttgtcggccggacgccgcaacgctgccacggcatcgctgaagaggaacgttgccggacctccatggaatctgtggcattaccactcatgatcgtcaatattccgccattcaggcgagattgagggtcgaccgcaacaaacctcatatggcctctactatcctgggctaatcgcccggacagcctctcctgccaggtcgccggtagctgatcacttcccccctgagctcctgattgtgactctctgggcccgtaccggctgggagaggcgtttcggctatccctcacatctcgactgcggccggtctccatagacacgttgctaacggttgcaggtccttccatagcgagacctccggtcaaaggcgaaaagatgtcgtttgatcccgttggaaagccctggtccgctacggctggccctccttggccccacgcctgaagttcaggttggactggcgttcctcccccgatccggtttaccgcgggtatgtatccgactagaggcggattggcagatgagcttgggagaccctcctacagagcgagttggacaattaaacaatgtcagtgcattgtacacagctgcgccgactaaatttcacatacgaatttgccattatattctgcatggtacgaaggaaagggccgcttcttcgaaccacctgattgcccaatcgacggtattgtcgctcctgaggtccattgaccacttccatttagcggtgagcctgtttgcatcttcaaggactgcatcacggcccctcgaggtatgttttcgatgtttgctctgcttccatgtggttcggctatgtccttctgtatatcaccggcaactttgtaactttgctgcgaccgacctccgtccgctccattgggcaaaccagagcccggtttaagctgggcctcttcgccacgaatcgccgcgacacttgaaccaaggtcttgcaccaatcccactagaggcatgagcttttcgatcatatcttccaatctctctaatcggtcggccacagcggcagcctgcgctcgatgagaagcagcattgtctgcgacgaccttgtctgatcacggcaagggaatagtagtgttgtgatcagccagggattccttcccaaggtagcatcctttttcccgaaagaaactcacagtcacaggtcttgtcattggtcaagcaaaaagaacaaggatagtcgccatcgcacttgatcttccgcttcctgcaaacctcgcaagctctccaggatctgcgctgcgtcctgagcaagccataggaaagtttccgctgaatcttgtcaggagtatctgggacgaagctcgccgcggagattgactcacgatgcaatgttccgactgccagggatctctgtacccgttacacctgatcctcctgattcggctggcggtgccgggccatcttgataacgctgcatcttgaccaggtcaccctgacgcctgaatgatgtagtagctgatcagatatccgacggaacagagggttttctcaaggtcattaagagttcgagagtatcacatattacgggtcacggacgagcagacttacgctcggccagctcgaaatatgcgggcttctacgccggtaaaggcttggatctgcaactgatcgactcggtgtccttagctatttcatcggcgacggacagcgcccttgccttctcctaatgaggagtctagatctcgagtatgccgatcatcttgatcggaagccgcgccgatcacaccgtcaatgaaggcttcaggagtatgagcggagtgtagaaatgtgcatgtcccattcaagaagaattgctcctgacctcctcctgcaaagaggtgggggccgcccatccaggagctagcgagtcgttcggcctccactttgtcaacaggagcagcttagagcggaggtaccttgatcaccgaggggaaagcaacacccttcggtacggtactaactcgcaaagtcatcgctcccgtacatacgtatcatctagagtcaaacagtgagtgtactaggagcacgtggggatgcaggcctgcatgcttgagatctgacctgtccttattcgcgaggcagccatcgatcgacctctggcccagctcgtcacgaccgttagtcaattagtcgcggctgtcggcgactggtcaggcgagcatggaaatgtcgccggggaccgatatgtctctaccgactggggtccatcatcctacactctcatcttacttccctctcatcgtcagccttgagagttatgtcaagcaacttgtcggtccggaagcatggcatcaggtcatagcaacgccaggacctgcgtctctcgtagactttctgagcaggacgctggtcgcgctggagaaagagggagcgaacgaactacgctcgggacgtcgtcagcaggtcggcgaagtgtatctgacacagcaggaggtatattacagtgtggaacggctcaagtcggtacgcgctgacatgcgctacttctagcttgttgatagatcactcgtcctgatagcaaagagaccgggaaagctgaatgagctcaatgttctcactgctggcttcagagtgagcaagagagatgaccacgggccgtctcttctactcatttgaccacgcctgcctatttcgaacagcgagcggatactctggcaggctttgcgcccaatatgcaaagactgggtctggatagccaacaagcgaacagccaggtcgcactgatcttgagcgatcctgtgtggtctttgttgcacgagaggtgagtttcaagctcttatcgattagtgccacttgaattcaatgttcacttgtccaaacctcgaggttaggctcggtacgaattttatggaatgcctgttttcacacgcacacctcgccgtatttctcccgctggagaacaattgtttcactcaactatgcggtcaacctgtctacatgattgagccgatctgcaaagtggaagagaggatgctcaagcggaaacgccggatcgagagggagatggccaagctaacgagaaaaaagcggaaatcgaatgaacaagcaggcactacggctggtatgcctgcacagtcccgattggcaatagatcccgacccacagctggatgatctgagacggtccgccgagttggctatcgaagcgtcggaaaataaattcgcaaggccgcccgtcatggtcgagatcgttcgaaacaggatgttttacggcaaatggggatggagaggcgataagcgactaccaggtgtaggccttccagtgaaacgtcagtgacgcttcaaaccaatatacgctcgaatgatctatctgactccaaacgcctgtcggacttcgagcagatatcttgaataacctgatcccgccggtcaaagtccggaagcttccctcgtctcctgaagagctatctcagatccctcgaggccatcatgatccagactgggcgcctcgaacgctgttgagatacatcttcccgcgcgaacatggccttcacaacgttttcacttcccctctttctgacgaaggttggagttcgaacgggtcaaaagataggtatgggaactggaagatcgagcccggaaaagccgcgtaccgaagctacgaagataggaaggacgagattgaggtgagaaaccggtcatatcgcgtaaaggcttcgaccatatctctcaagtcgtttttctgtgcatctgaaggctgcgattgctgtcaaggatgcgaaaacacctcgtcggatgaaaggcaagatgctggagatgatgaagcagatcattgcccagcacaaaaagtgtgattatcgtcgcattcgcgatgcatattgtccttccaaggtctgtcacatggtctgtcaagtgatcgtactgcatgcaatggctgaccatccaccggaaagcagacggtcgatagcaacctagtctgtagcgacatagactatgtgaagcgggaacgatgctcatgaatcctttcttcgatttgcagtctgctgacacgcggggagcagcagcttgtgccatatctgctgggcaggtaggttccataatgcgatgacgatgctgatggcttcgtctctgttgaaaagtgctgatttggtcatttaggtctcccgttttgtgctagcagtctgccgtttcgttttgcccgaggggttctggggaagtcctgataacgcgcggcatatgcgcagtcgtaagtagagttcacgaaggcaagccattctgtgcgagctgacgatgccattgacatcagaaactgccggattcatcaaagctcgacgttacgagacattgtccgttcaccagatcctacaagggttcaattcgaacgactgcttatggcttgcagcgggagctcaaggcaccaagatctcggttgacgaatccatcaagcgcaaagatctgatacatgagttagtctactggttcttcgacagcttcttggtaccccttctcaaggtcagacatagatttcatctcctgtcaaactcgaactgacgtacaacacacctgtccagactaccttttatatcacggaaacgtcgactaccaagtaccgtaccagttatttccgccaagacgactgggaagcgctctgtcgacccatgatacagcatctgacttctacagtctattaccgtctacccgaggtgattcggttctgagctgggcatttaccacgagatttaaggcctctgatcatcgcttgccgagtagggtcagcaaaggtatctccggaaacggaaattgcctcatgctactgtaagattgattcccaagccgaatggcatgcgacccatttgcaacctcgggaagaaacatcgcatcgtgagtgaggcggccagaggctatgtccaaaagctgatcattttgcccttctagttggcggacgatgggtccgtcctggtaagagcgagtatcaacgataccctcggggatgcccaccatgcgttaacgttcgaaaaggtatacctggagatgcctggacgacccttcggcacctgtcgctttctgaccaacacttggcctcgcagcaatatcaacccgaactcttgtcctcctccttgttcggcctctacgacatttacgggaagctaaagtcgtataaagcgagtcttatagaagcttacggcgagatgtgagtctattcatcatgcgatcgatcaggtcagggcaattaaaccgtcggaccagtcctcctttatactttgtcaagatggacatcaaggccgctttcgacacgctcaaccaggaaaagctgctggcggttgcagctcaagttcttcgacgggtgagtgtctacctcgttacgtcatggttcaactcgatgacgggtacaactcgatgcaggacggagactatgtggctagaaagcatgtgcaaatgctgcctctgtctggtcgagctccattgctgtggaagaaacacgcttgtccagaacgcaagtcgccacctcgatgccttccgtcccaaacttaccgacccccctcatttagccttgtcgaagagcttctctcaagaatcacacgggttcgctcagaagctacaaaacgcagtgtttatcgatcaagccgattccactttccagttcaagcaaaacatacttcgagacttgtttgagcacgtccgacatactcatatcagagcaagtgtagtttgcacgcgcgtgcggcaactctaccgctaacaagatgctcctgccagttcggaaaggattactacaagcaagacaccggtatcccccaagggtcgaaagtcagcagtctcttatgctcatacttttatggccatatggagacccacctcctgccatttgcaactgctcaagactgcgtgagtcgtgtattagattcctcgcgctagctcccgctgactcatgtaggacagcttcttatgcggatcatcgacgacttcatttttgtgacaccgcggcaggatcaagccgagttgttcttacatacgatgaacgaaggtgagtgtggagaggttgtggaagagcgaatcccattgagtctggctccgtcgatccaggttcggatgattatggctgtcacgtttcgctggagaagtccttgtgcaactttgcttcccagcacaagttgccaatccccatgacgatcgagggccaacgtgagctacaaatggactgctcatatgcttggtaactgactgacatcttaaccagtctttccatattgcggtactctgatcgatcccgaaaatctcgatctgaagatagacatcaagcgcagttacggcatccgtaagaccgaaacactacgacctgacgtaatgtcactcactttccgattctcgcagacgttcgggagatcctttcagtcaaatggactagaacccaaggcgccaatttcactgggtggctcaagcggtaggtgacacgctcgggtttagccaaagatcgcgactcacgctgtcggatgatacgtgacagtatgctggaaaaccacaatcacatgatctatgtgggcactcatgtttgaggtctgggctccgtcgattcgccactgaccaaagtgcgacagaacgacactggcctttcgtccttcgcatctgtttgcagcaacatttacaccaactttttgctgaccgcgatgaaaaccgttcactatctcggagagttggatcgtggtctaggcgtcaacgatcaattcgtctacagcaagtcgttgtcgcgagtcgtttgctgttacatcattacttatacccgcggtttctaagcatagacgcgatcgacgccgccattgcgcatacagccaatgcgaatcgcgcgcatgtcaagtcgtacgttggtaccgtgcaggccgccgagtgttccgtttccaatcacacctttgtctggtgagtcaaagtggcatcatcgaccctcaccgaccctgacaggtggacttttccaggatcgccaaacacgcgtttgcacggatcatgcgagaaaagggagaccgattcgcgacggtacgactggtcctcgaggaagacctgcaccatcgtcgctgtatcaagttgagcaacgatcgacgcctgaggaagatcatgaggacgacgtgggagggcgtgtccaaggtgatcttctaagatagggagataggtgactgtgtaaaccattcgttcgttccatcttgccggacaagatatgctctcgtggatcttatgaggagatgcaaggtcgagaagctcgatttcccacctagtcgctcgtcctgcacgcaagcgaatcgccgaacaggatcgtcatctgacctaccgcttgcgcgattcgtcctagcgttcgtccgttgcagagtcatcagcacacgattcgcgggctttgtgatccagtaaaaggtttaacgaggagcaatattatcatcaaacgaccatgctctcgctgtgcgtctctacaatcccccggtcgaccccggggctcaccacctcggatcaacgtccaaacaagcccgagaacatgcctccaagcctcatccccaccgcgccgacgctatccagcgcgggcctgacgtccaggtagaacacggggttgccctcgtcgtccggcggggcagagtagtagtcgatgacgtatctgatttccgtggcgggtccggtcggatccgtagggaccggtcggtggacgacccagtcgtgacgatcaaaggggggttcggtgctgcgtaaaagaaagacgggaccggtcaggccacgactctcgatgggcagaggggacgaaccgacgagccgcggggggggggggactcacttgaatttcgagggaaagacggatccgagcaagaggtggatccttgcctttggtgagcgtttaccgggatgaccctgaaacttggccaagcgggactcttttcccctggaaagcccgatcatcctcgtcagcttgacgaatgggagcacgcgataccgggaaggacacggggggcccactcaccctcgttgcgacttttcccaatcgaggacttcttcccatgcctgctcgttgaggaaattatggatctcgaccatggtctctacgtgttcctctggcgtttcccagccctttcgaacgagcgcgttgtagaactgttgaggggatgggtattcccagaccttggtatcgtcccggttgggcgaggtgttgtaagggttcgaagggtccatgtagggctctgacgaggtggaagctgggggaggaggttggatggaagaagaggaggccggagctgggcgagggatggtactggacgttcgattggtggggagatcgatccgctggttaggagctcgatcgtgtgacaggtctggcatctggttgagcgggttgagtgggccattgttcctgtcttcgtgctggatcggacactgggcaggtttgttgttcgccgccgaggaagaggatgacggggtaggaggagccggggtatcgtccgtggggacgtacttggacgtcgagttgttggcagcgtgcatcggacactcggcgggaggagtgcccgaggtaggatgagaagctggtgcagcgggcatctgctgcgtgaccgtcggtatcgaggcgggcgtaggggtggaagcggtctggcccatatcgaggatgtgttcaatcgttctaatgctgtcaaggatgtagtgtgtatgaggtctgaagactagacaataatcaaggcgatcgatcgtgattgaaacgacgagatatggtcgatcgttcattcgcggcaaaccgggagggttgggtggttaggtttcttgaacttttgctgcgcgcggtctcgaccctgtcgcttatacacatctccgagcccacgagacccaaacccccccccaatcccccccaagttctaccccccccccccctttctcttcagactcgttcataatctacactcaaagagcaacctcgccactttccctacaacccactacaaaaccaaccaaacaaacatcaccaacaagatgaagttcgccgctaccctcaccgctctcagcgtctttgccgcctcggccgtcgctcagaccatccagatcgctcaacctgtgagtccctttatcctcgtgcgatgtggccttcccaccgtaaagacctggctggttagcaagttcagtcaaagaggacgtcgacaagaaatgaaggaagccctaccaacgatgttagaacagtccactgcggaaaaacgagcttgatcatcagtacagccataccgtgtgatcccgctcgccgcgtcgcctttctgcacgttccccccgacaccacgcattcgagcgattcttcgtcaatgcgcccgcctttacctcaccctatccaacgagctcgatcttgacgattatggtcatcctacactgcgaccacgtaaactgacacattcaacacctgcctttccttcgcctttgtcgaataccgctttcatgctcgtgtgaaatcagcccaacttcgtcacctgccagccgggacgaatctcgtggaccggtggttccgctcctttcgtaagttttgccgtgaacaacagtcaagtcgttgttgttactcgtactcatcatgtcattatctgcgcagttcttgtccatcctccccggtggcaacaccgctgccacccccttggttgacttgggtcagcaagacagcaacgtctacgtttggaacgccaacgtccgtgagtacaaacgccgagcccgtagcaaacacacgtgaaaaggtagccagactgacttgtcttgtcgttgacctatcgtcgtagagcccggtcaggagatcaccgtccgtatctctgactctcagggaatcgtccagtactcttcccagatccccgtgatcgccggatccaacaccgactgtgtcggtcagcccatctcgggaacttcggctggctcgaccgtcgctgccaccagcaccggttcccagtccactagcgtcttgtcgaccatcccggtcgcctcgtcggtctcttccgccatctctgcttcttccagcgccgccgtttcttccaccggtggtgttgtcggaggtgccacctcgcgagtctcttccgccgttgcctctgcctcgagcgtgtaagtggatagatactttcgccacactctgattcgtgcgccggagctcatgcaacgtcgttctggaccccacagcgcttcgtcggttgccgcctcggcctcttccgttgccagctcggtcgtcaacacctctgccaggtccaccggtgccgccgccagctccagcgccaccaccgccgcgtaagtcgctgcatcgcgaaaccacgcggggctactgccgagactgataccccctcttgtttggttatcgatcgacgtagtgccgctgcctcttctacccctgccaactctgcttccgcccagtcgatcggtggagtcggtgccgttgtcatcggtgccatcggtgccgtcgccgccttgttctagatgcgcagctagcgagcggtcttgatctcgtcctcctttctgcattctttggctcggtcgaacgcgggtcaactcgtctcgacgggctgatgacgcttcgattggctagggatgtaacggggacgggcgagtcgaggcccgtttggatgctgttttgcgagccgtggccggaccgacctatctaaacgtcgggatatcccagcctcgtactcttttctcttagtgtgcttttggccatctgtttccatcttgatttctttatcgtccgagagaatcttcattggaacgtttattcttacattatattatcgttaccttgagatccggcctcgtcttgcgcgtcttgacggtctgtgcaacgtgtgtgttgattgtgcgatctgactggattcaggggcgatcgttgtttacaggctggatggggaggtgtgtgacggaacttgtcgtcatatctctctcgcaatctcgctcgctcgctcactttgtcaacaatcgaccgatcacacacctcgtgggggcagccagagtagagagggtctcctttgtcagtctccttccggacatgatcagcagaatcatcttgataacggtggtatgaaccaagatcccctttgataaatagaattgactacaaactactcaacaggctgtcatctcggaccgtgccttactacacctcccccgtggcatacttgcaacacaatgccgctcctccaattcacccccttgcaatcccgcccgtccgcctcgttctggtcctccttgacctcgctcaagctcgatacgttgaaactggatgataccgaatgggacgtgatcggctatctcgatgaggggatgatggtcaaggataggacggcaagcaaggacgggcaagaggaaggggtttgggtcgcggggagtcttgaggtggacgagagaagcttggcagagagcaggtgagggcccagacaacgccgtgtttctgatcgggtttggttgactggctttgacgtgtatgggatgcatccgtagtaccggatcgaatgacgttcagatcgagggcacgtttcgaaacttcaacacgatcgaggatttccgcaaagtcgaccacaaaaaacagttgttcgacgagacggtcgatcgagtgcgtcccggtcttcgcgatatctgtcagatacctctttcgtcccgctactaaattgttgttcctcgggtagctcctcgcttcgttcgaatccggtccgatgacttttaatcctttcctcctggtgacctatgccgacctgaagaagtacgtctacaactattggttcgctttccccgctttggtggaaaagcccggatgggaagtcgatgaacaggggatgcagccgtggcaaggagatgtaagcgattgttatgccaatcttggtcatggctctttacgctgatcctgttgtgcaggctgccgagctgagacgatgcaagcgggaggcgcagatcgagggagaggctttcttgtacaaggtggttgatgggcgtactactatcggccaggtcagggattggagatcattctttgaggatgttccggaatccgaggtattctacgttctccctcaattcatcccctcgtggaataggctaacgcagctccttcgccccatttgcagagaacgctagtgttccacgactcgacatccattccttcccttccaggctggccactccggaacgtgctctactatctcgcgcactaccaagctgtacagagcctccgggtgatctgtttacgaggtggtccgagcggtcccaccgtcctcgacaaggtcttcctctcttcgccacccgctagcggttcggaacgagttagaccctcggccgtgggctgggaaaagaatgtaaagggagcgctggcgagtcgtacagtagatctgggagcgaccatggatcctgctcggtgaggaacgtgtcagtcctcatctagatcgatgctgataaactcatcccgttgaatccagtctggcggatcaggcggtcgacttgaatctgaaactcatgaagtggagggtcatgccggatctggctctggacgagatcgcagctactagatgcctccttctaggagcggggactttggggtgttatgtggctcgaactttaatggtgagactacacagtcgaccagagtatcccttggaaacccccctcaccagaccgtcttgcccgatcacagggctggggagtcaggaatatcacctttgtcgattcagccaaggtgtcgttctcgaatcctgtgcggcaaccccttttcgagtttgatgattgcttgggaggcggtaaacccaaggcgcaatgtgcagcagacagtcttaaacggatctttcccggcgtggtgagtcgaactaaccaaggtggttgcatcatggaagtctttcccgctgatttgccatgccggagagtatagaactcgcggggtatcgatctgatgatccccatgccaggtcatccggtcgcgcccgcatcagaggcttccgttcagcggtctgtcgagactctcgagcagctgatggacaagcacgacgtcgtctatctcctgatggattcgagagagagccgatggctgcctaccgtcctagggaatgtgaaaggcaagatcgtcatcaacgcggctctaggatttgattcgtatttggtcatgcggcatggacctcctccaggatccagtgagccagataaacgccgtttgggatgctattactgcaacgacattgtcgctccgatggacgtgagtcaccgctgtcgcttccgatagggctctgtagttgcaaatcttgggtgtgtaggctgactcgagttcacgtagtctttgacggatagaacgctcgatcagatgtgcaccgtgacccgaccgggtgtcgctccgatagcttctgcaactgccgtggagctgatggtctcgttgatacagcatccccaggggtgagtgacaatgctgtttcaatacattccgcaccgcgcctgatttgacctcgattcgggtccagcgtgcacgcaccggcagaccttgcagccggatcggccaccacgggcggatcgtcggatgagaaaggttctcctcttggattggtacctcaccagctgaggggattcctagcccaattccgtacgatgcttatcgaagggccggcttacgatcgatgtaccggttgcagtgccaccgtgagtcttagccgattccttactttcttcgatcgttagtcccattgactgtcacctctttgtccggtcttaggtcgtcgatgcgtacaaacgagacgggttcgccatgttgctccgagccttcaacgaagacaagtttttggaacagctgaccggtctcgacaagctctatgaagagggagaagcggctctcgaacaagtcgattgggacgaaagtgacgccgagagcggagctagcatttgatcgttccacgcatcttttctctgatcactacatcaatcaatcttgtcgtttcgaatgtcgtgtctgaagttgtaaacctcatcaaagtcgtcaggaaatgtcgttatacccatctcatcacaatgaccgaagtcgatatcccgggcttccgcccacctcttccttgtttgcgcgtcgccttgatctcgctcggatcgtgatcatcagcgttcacgttcactcttctggtcctccaacttagtcatatgagtcggtcgacgcaacgtcgaccagccaaccgtgccccctcgtgagaaagacttgagcatcaacctcgagatcctaaatatttgacgaaccgagagcggctttgtgcgcggcttacggggatccatcaaggcccccaggatggccaacgaggacgatgatctttggggctcggatgacgatagtggaaatgaagaccaggttagcacggcctgtgtaggtcacggtcgtctacgctgagcaggaataacacgcgcaatacaggagaatggaaacgaagacgatgctatggacggttcggcagtgtgagcagactttgaggtggatctacaaagccatactaagtggtcttgattgcaatataggggccaaagccaagtcgaaactgcggacaacgatgttgatatggatggcgaggatggagaggatgaaacagacgacaggaagccttcacgcgatggggttcgacacgatgatacggtcaagctcgatgtggatcgaatgcggacggcatccctacccaacacctcttcggacattcctgcaaatatccaacgacgaaagctgttcgtcccttcacaggagattatgaaccagcatttgcttttggaccctttcatcgtgataccgcaaccgggacatgttcatagtctgaccgccactccctgcatgtcatacctcttgacagggagtgaagacggttatgtccgagcctacgacttttgggccagcgccaacgggaagaacatgctgtctacgcaacaaagggcaatggccactctaggagagggtgtcaacaagggaggcgtcattaagggttactacaagaacgaagtcgagatcgaagaggttgttggggaagaagaggaaccgccgcagaacgatggtcccgctctaccatggctgcagacggcggcgcagactacaaaagcgacgaaggaggtgatcaagatcaagaaaatgcagcccgtccatagtcttgctgtgcaaggagacggactctggtctttatcaggtacagaggtatgtttcagatccactttctagcttcctactaggatgtgccaataacgtattctttgctcagaccggcatgatcaatttgactacgatacgacacgacccaggacgcattgttcacgtattcgatactgccgaccgacataataaaccggtttcggcgttgcttctgaccaatgatgaacaacacctgatcagcggaggctgggataatcaagtgaaagtgagtactgcgctacggctcgagtttcacgactccatcctgatatcaatctcacctgaatgcaaaaaagcaatgggatctgaacacgggccaagtgataagaacttttagcaaacataaaggccctatctcagcaatacagttcaggcctctcggtttgcctgctacagctaataaaggcaataatgtagcgatcacgctgcctaacggcagcgcttcaggtccagatgctagcatggcgcccgagacagcgaaaggttctggtggaatggaggacgccgccggatccccagactcgtatggatccctatttggtgacgaagaagaggaagacggcggagcaaagaaacaggagaagcctcgcccagcagagccggcggcagtgaaaccgccgaccaatcttttgccgtcaacaatatcgggtcctacaccagctacaacgcttccgccatctcggccgggtattctttcagccggtctgaaaggtcagcccagagtcggtttacccccgctggcacccgaaacgtaccgtcaattctcggacgacgtgatgctcgtcgcttcaatggatggcgaggtcgctcttcacgatcgacggatagagagtactttggtgggaaagctcgaaggcagtctcaagagtggaccctggtgcatgtcggtaagactgtatgtttgaatatcattatgcgatggatgctaaacttcgagatcctcacaggcatgcttctcagcggatggtactcaagtcatcgcaggccgccgaaatgcctcgcttgatgtttgggatgtgcgaaaggggggaacgagcgggaccacggaaaccccaaacttgctgcgcacgttgcgccatccggccacatcacagtgggtcagcgcggtggcggcttttcctgatgggaaacatatcgcttggtaagcgcgtggtaggacacacagagatgctcgcccgaggctgacttggtctctctctttacggtagtgcatcggtcgattgcgtgcggttgtggaatacggcggatctatggaatccggagagtaacatgaagaagagcaagtccggggtaccattccgtatcgttgccggtcatcacggaggtaccgtgtccaagatccgtaagcataggtcgaactgccaataccctaatctgaagaaactgacgaccttttgatttcgcagatatcgatccaacgggacagtacatggtcacggcaacaggcaatcgtggttgggcgggagatgctaccaaagtagtactggtgcacgagaggaaatgagacctcgagttctgctacatccgttgtaaccctaccttatcattattgcatacaggccaaaatcacgtgatcatttcgactcggaacctatttgatcgacagatacttccgtctaccccggatcccgatcgccgtatcatagccggggggaagcgatcagcactcagcctaaacttgtctagcttgtctactcgcagataggtttgaagcttctctgatgtcgcagcggtcgaaccttcagcctctcaccattctttctgatctaactctattcaacatcaagatgacttccccagagcagttcacgggttacgctgtacgctcgcgtctcctcgattcttgtggcttgacctgacgtctagctattcatccaggccttcgagcaacagcacgacgttttcgatctcaaacgacactcgtatacccctagggcattcaccgaaaaggatgtggatatcaagatccttgcttctggtatttgcggcaggtcagtcaacgaggctctacagcttggcgttccatctagatactcaacctgcaatcatctgctacagcgacgtacacatcttacggtcgggctggagtcagtcaaagtatcccgctatcgtggggcatgaggtcagctaaattttggctctgaaactgagacacaacgctcaacaatgctccttctccgtctgccagatcgtaggggaagtcgtccgagctgggtcggaatcgggacatcaactaggcgacatggtcgcatttggtgcccagtgcgactcttgcggcaagtgcgaaacttgcaagaaccagttggaaaactactgcaaaaagaagtggactgcgacctaccagggatcgctcgggaagggagcttatacccagggaggttatggtgagccgtaatgtccccgccaggtccattcggggaattgatcgctaacattttgcgatgtagcggattactaccgcggaccgggaaggttcgccatcaagttccccaagggtcttgatccggtcacgcattgctcgctcctatgcggaggagtcacgtcagtcaggatgccccatgacccgtcggtcccccgctcatttcttgtaaacgaatcagtgtgtacgcccctctcaaggcttatggagccggaccaggcaagaaggtcggtatcgtcgggatcggcggactaggtcatttgggtttgcaggtaaatctctcgaacaaatttggggtcctgcatgctgaatccagtcatctcggacacagttctcgaaggcgctcggagccgagacatacgctctgacgcattcggcgtcgaaagaaaaggatgcactcgccttgggcgccaagaaggtcatcgtgaccaaggaccaaaaggcggccctggccgaatatgccggatttttcgacatcatcatctgcacatctttccagccgaatatgccgctttcgtccttttacctgccgttgctcaagcctaggggacagtttatcttgaatggattgccggaagaggatctcccaccgatgaagcctcagtcgatcttggggaagagcttgaccggatcactgtaagccccacgcaaacttcaaggtcgactctgtggtcagcactgatacagactgcgatacctcaatgacttccttgacaggatcggctctccagcagagattgaagagatgtttgaagtggccgtcaagcacggtgtgaaaccgtgggtgacgacgtaccctatggacaaggccggcgaagcggtcaccgcgatgcacgaagggaaagcccgctaccgatttgtacttgtgccgaattaatatttcacataagaatgtatcgttccgttgactgtggcaagcgagacagcatcaccgtgggccggtcattccgagtgttcaccggtctctcacaaggatacatccggaccggaagctgtccaacttccgcccgatcggccgacaagagcacacactctgacggcgtttccaaggatatggtagaacgtttatccgggaatgtacagttgaatacgttggggaaaaaagcgctcgtcaattgaaaggtctgcaacctatatactgctactcatgcgcacattgaaccgtaacaagaatcggcgaccgtaaagtggccgcgcctggagagaatagggttccgcaaatatgaactggatctggaaagcgtcggaccggccgcagcctaggatcaagagcgagattcagttgcagaccgactttgtgatgatcaatcctccggagtcatcggatcgggaattagaggaggaactggatgttccgaaaggttccgttttgacgggagagctcctggtctcggcagagccatacctcaatgttcgtgccgtcgagatcaggctggaggtcatgtaccggtatctgcaggagccgaagacttggaaagagggcgttatcttcaacctacgtcggtcgtttcacacggatgaggtggtatcatcactgaacgaggacggtagcctactcaatcacaagctatactttgccatcaccattccatcgagcatgccgactttcgaacaaactcgaacgactagcatgagtcatcaagtcatcgcttcgacggaattggggttcaactcaacctctcctggctttttgaagaatataaggaggagttcttcggtggagcatctggatcgttcacaaacagaagcgctagatctggagactcagagcttttccggcggatacgtttatatgccgatgcgtaagctgttctctagcgcttttggtcaacttcctcaaggtgactgatcataccacgttcgcctcagtcggtagtaaacgcgagaccaaatatcacagcagcggtacaagcggagactcgaccgttgacagggtgacacagactttaacaaaaaatattgccatcgcggctcacttggacccgactttcgggacgtacaagctccgaacgagaaagtcaagttcggtcgggggtgcaggtaaatgggactgttccctgtggagcgattcagtgagtcgaaaagtcgctcgcttgcttgtactatggagctgataagtattgtctagttctcggttggcagttatcttttggcccggttcgatgccgctcagataccaagcaactgcaccatattcgccttgaggctcagtatggttcagtatttacatacagtgccgatcgaagagttcatggccgacaacttgaccgaagtaggcacggaacataagccagaggacgtgcccctgtctacattcggccaggtgccaaaatcagcaagacctaaaagcgacgttgccgcgctttggagaggatcagatgtccctgtcggcaagaaggacgacggtcacacccctggagattcgatgtttcgctgggatacaggaaagttgcggataccagatgagaaggtcgtcaggcctagcacgtcggacgggtgagcacacgatcgcggagaattccttgatgaaaccgggaatgcttaatatcgtttcgctcattgtgtatagcacgatctcacctatcaggatcagtcatgctgtgatgctcaaggtcttttattctcttcgtggcttgaccctgcagaacgaggcgattcagggggatgatcaaagcggggatctacgcatgctcgtcatcccagtatccgtgcgcctgccttcggtgagacatgtgagatttgggaagctcatattcaaagctaaccggcctatcgatcagtgcatgtgcatcgtcgaaagagtcaaactgcccgaatgtgagtctctcgagcttgccaaggtgagacaagagatatactgagctgcggccgacctcatagacgcaccacactcccctcaggcaactggctccacaagacctcctgtgtgtgcatgctgctgcaggaccgaagaatttggatgccctgctttccctgacgaattcgcagacgaagaatccgacagcgacgagccgagacatcgaaagccttccctaacggcggtccgacgggacagctcgccgcgtcatgggattcccataccagtctgccagtcttgattacagatcagcaagaccatgccaaaatagcgtccacccaacctttgggtggagtaaccctatcacaacccagatcgtcataaaaacaaattgtccagtctcggctgccgctacgccctgcgaatctcggaagcagcgaagcgactttcaagtcccatcccaacacccatcgcgactcccaggcccattcccacgcctttcttgcgttggcggtactcgcggcggaatcgcatccgcacaagggtcatgtagaagaccactacgagtccaagtcccatgagcgagcagtaaattccaaggccgatagggagaacagcaagatgttgaccgggaaatggaccatcctatagatggaaacgttaaacgagaaagcgagactgtaagaacaaaaccagcatataattttcgatgcaacccttacgtacctcctcggccttgatgacaatctgatcgtcttggtcgtcagccgccgctgctgagcggtcagctccggctgcagaagagacttgtgtctgcgcaagtaacagatcgcttgttcttccacttggtgtcggcctgctgcatcgctggacatcagtccaccatctacctttactgaccagtcgactcaaatttgccgacctactcagttatcgttccgacaaccacatccgttgtcagtcgcgccacggagctttcgctagcttgcgcggtaggaaagagtacgctgggcagcacaaccgatgtgggattcgcttgctgtaggttctgcgtggctggctcggcggaggttatctggcagtaaggatagggaccccagatcagtttggggtaacatgacgtgaacgatggcgaccgaatgatatgaaccgctgagctcacttgatctggccagattgtgctcgtcccgccgtcatcagctcgatcctcctctgttgtccatgtcactgtcgtgctacatttctgatcgtctggtgtagctgaccagaagtagcatgtttctgttagagtctgcccagcctcactgaggttgaggcagtgcttggcccatcagcattcacagcgtttgtcccttgaagccaggtgttgcacgctcacttatttgtcttcgtcgtggtcatgaccattccactcgtctccgcatcttgctgtctatcctctattcggctcttccgtagaggtaccccttgaacgccagccaagaataatgcgaagaagaagacttcaaggacctttcgacatgtcgtccgacgcatcggtcaaggggggaaaggaggattagggagtgtgcttgatcttctggcggcggcgaggaaggaaaagctggcgagactacgtattcgactgttgtggactgtcttgaagtttcaatgaattcgagaacggacagcctcgatgttgttgattcgggagggttttccggggattgggaaaggtcgtgaactgtttgcgatcacgggtcgcgagtcgggggatcgtgaaaagtttgagggccgggcaaacgagcgtgagttcgtatcaacgagagtgtgattgtcgtaaatgtctatgtcgtagttcttggtcctgccaatggaaagatcagggtcactgagaggtcgaatcgaaggcgggtgttgtatgtcgattacgggttcaagtgaaagtgctcgtctacctttcttctgttcgccccttcggatccagccgggcgcggtcgcgggaggaatgggggtttaataatgctcgcgttttgtctcttggcgggaaactcgctaaatcgtcaacagcaaattgaacgctccctgacgatttgtacaggtcgcagacccgtttaatgtgatgtcaagagcggcttgtcagggtacaatggggagatccattggagcatgcacgtgtctgtcatgatataagtcttagatatcgtcgatcgggaggcatcactcgatacactttggccgcgtggaaaactcctttgatgcgcagtttcgccggtatcgatgcgtttcaggcggagtgtcgacacacgacaacggcgaccaaacgctctcgccaaggaagcgttcgtcgatcacattagaacagcagggctcaagacggcatgaacagtgcccgtggtccccagctcatgtgtcacatatcacatggtcccatcccgatatctcatgcttgttacacgttagaacgctcagactggataatctgccttcacgtaagtcgcagcttcgcgatcatcgctcagcatccggttccactaaaagcgtcgtttcgagatccggccgtgatggtcagcatcggcacgtccgcggcgtcgtgcgttgattgaccgagtaggactcacctccagtgccaacagcaacgtgtagctttgcatgtccacccaacgcattcgcttctgagtgaaagcataggcgttttgagcaatcttcttggcttgatcatcgtgagcgatgccgctgccgtcgggtgctccggtaaagtaggccataatgtcgctaaaacgaaacgttttgatcagcctagcacccggaaaaacggatttgggccccttactatatgtcagaatagtctacctgcaccgggacgtaatggtacctttagcagaagatgatagtcagcaaataacgcaagctcgggcggctgggtacaacggctaaccagggcacaagaacatgctgtttcatcgggcaagttcgttgtcagtgagttaatcgctgtctccagcccgagtcaacctcgattgcttacactgaaccattcgggctgcaagattgtaatagtgtcaacgagtatcaatgggactgtcagtcaaaaggaggagcgtacgaatgctgtactcttaagcacgacgctataagtgcgatttcatgtcagcaaaagaatttcaatctcgctagctattgcgcttacctgtttcccttcaggagtctggtgaaacgctacaagggtcgactatgagtaatatgactgtgcagagataaattgatagctacgtacagaactccaaccgtttccatcgatgtcgaggttgtatttatacctggaggcggagttgaacatcactttgttcagaattacgaacaacgacaaggaaggatgatcttacttcagcgtatccttgggctggactcggccgccgtattcgaattctcgttccacaatttcacattcgccgggatcactggttatggacatcaaaaggtaagcaggtactcccgtttctctctatccctcatcttgactactgaccactgtgaatcgcgaagctgtcagtatcatctaaaatcgcttggatgcccacctttaactcacctgcacggcgccgccaactggagccacatcaagatacttgtcgttcaggacctccacatcgaaagatttcgtctcgatcttgccgttgccgatatcaaccaagacgtcttgcgaagcatcggtttctttgactttatagcatatccgctcccgttgggatttcctccaattggtccgctcattgtggaatgcgccagtgagggaacccctccagaaagcctttggtatggttttgtcctcccaggccgtcttctctatagtctctgtgaatcgcgcaccgggttgaacaggccagaacatgagacagctgctcttgacatggaggagaagatggccggtttacagactcacggttaacggcgtcaagaggtactcccaagacatcagtgttgtgcataagctgcaatacacgactcgtcaatcgatttggctctctaagcggttcatgcccgcatgatgcgcctaccttgcaggtagcaatcctcggaaccatctccttggcacctctcgagcgatcttcaatcagggtgccgtgctaaagatgatcagagttagattggttctttgctcaacatcgttcgtctttacagaacgtacgatctcccatagctttgggttatagcagtagtcgtagctttgcataacatccttgatgaaggtcttgttgtgactcaaaggttcgcgggcttcgggtttgtcattcagaaccagatctaagcggttctgccgcaggggtgaccctgctgggcatgtgagggacctttgattaaatcgatcagggcgattgtacgaaaggccattgtgcgttttaggacctaccagccaaacgtgtgccgcatcgcggcttcccttcgagatagatccgcgctgctccaggctacgggtgcggatgcggttcagtctacattgcgacttctgggctggaaattcgaactcactcctgccgctatgagctaagcgaacgctcttctccacaacctcgtgatgcgattggccactgggtccatcgtctccagcgaagtagagtttgagattggcttgtcccggcagaggctccggaatatacggcaataggggtttcaacaagagctcgttatcgctgtatgaagcggccgggcgccggtcaggtacaacccacacaaaacttgagatttggacggcgagactcactcagcccggtagaaatcggcgagtgatccaccacgcttcagctcttttgcctgtccacctccttggaaatcgaattcgaagctataggtagacccaacgtcctctactgctgacaacctggatcgcaacagcgaagcaggatatgaaagatagggtagcacggagcgatgcgcagagggataaagagagggcgcgacgtatgatcggtggtctcgggcgaattgatacctgcaccacaatccggatttggagtaatcagccatcgttcgagcagattcatagatggacattcaaccagctgcctaccacttctcgaaccctctaggcggtttcataccatacatattctcatagtctttcacggcatcccgcaagtaaaggattcccttgttcttctgttctattgctttcgctttcgcttcagcttcggccagtaagccctcaattggatgagggcccgtagtgtcgttggaaaccaatagcagcccgtgtgtattgggtcggacctttagccctgaagtgacatcttccttcacaccaaggacgcgctgcctcttcccggcatttccactacgcgcaaacccagtataacctatgcttgttccatcgcttgagctctgttgttggcaccggatccgctgtcgcacaagaagggtcaaagagaccagcaatgcaactaagcagctcaaggcgagcggcttgctgttccaacctctgaatcgtctgttcattctaagttgatcggctagcgaagctattgtttcgagcaggcttgtacatgaggtgcaagcaaggagcatagcaaaatacgatgcatgtcaagacgttaagcgaagcgataacagcaagggccagcgtagaacatcgacgagccgatcgcggaagctgattcgggtaaaatcggatgcaaatcatgaaatacgtgccatcgaaatactattcaacacgctcggggttcgtcaatgatactatgatacagatgtgctgaatgcagattggacgttcgtgataatggtctccagaattccagtcggggagatgagaagtggacggcgcaacgccaggccgaatccaaacttgttcgagaccagtcgaacaggtcagtcgctgctgaccatcggcgagcgtcgtctatgtctcggttctgtagtgcttgaagtagtcgtgttgcaaagctcgtttggctattaccaagatcaggtatgttagtgaataatgaaaagatgcgtagcaagaggagcgggtcttacccgaaattcggtgagcagggtcgtagaccaaagttcgctgtttcattcaagcttcgcattaggtctcggtcgtcgtcagcgatggaagactatcttacagccaaaagatcgatcccttgagcatccaatgcaggcacggctcgctccaagtcaacggcgttccactgcgggaaagaaggcttgtagtccggtagggtcgatacaccaggccagatttcatcgttgggagttccaaggactctgatggatgccaattaaaacgcgttagaaggattgtattcacacccacgaggaaaaaaaactgaccggaagatcctaaagatttcgtcgatttcagagtccccgggaaacaaaggttgcctcatagccatctcggcaaagatgcagcccaccgaccacatgtcaatggcagtgctgtagtgacgggatcctagcaagacttcaggcgcccggtaccaaagggtgacgacctgaaagagaaggttgttataagaatcgcgcaagcgaagcggtattaaacgatcttacctcatgagtataggttctaagggggattccgaaagcacgagcaagaccgaaatctaccaccgccaacgaaaatgtcaggccgtgccgattagcctgtttgcttacttgactgacccgctaacttcaggttcccctccttgtcgatcaacaagttctgaggcttcaggtctcggtggagaacacggtgagcgtggcagtagtatagacctttgatgagctggtatgtgaatttctgcgatcaagatagcgagctcagctacctatcaccaggggcacatgacgagaggatgggatgactcactttgaccatcagatcgctcaagccgtccggagaatttccaacggtgtccatgtactttttgaggtccatatcgacgaattcgaagaccaggtacaatttttggtcttgatgaagaatgtcaaatagcctggtatgggtaatgcaatcggtcatggtcagccaatgccaccgtcgttttagtggtaagtgaatcaatatatagcttgctactcacttgacaatgttgtcatctttgctcagctctttcagcaagctgatctctctgatggccgtgctagggacaccctcgtcttcagcttcgagacggatcttcttgagggcaacaatttgaccggtcctgatatcccgagctttgtaaacgacaccatatgtacctgcaaggtgcgcattgcattccaaccgatcgacctcaataccactctcccgcgggtaaacaaacaggctggctcaccctctccgaccttttcgagcttggaatagttgtccatagcttttgcgtagtcttgctccttgtgcgtgccttcgcaactgagatcctttgagatcgtgacgtccaaaggtgtttcgtggcctggtccagggcgtttcggtgacggacgatctagttggtgcgagatcgaacactgactgctatttcaaaggggggtccaagattcgtttcgtccgggtttccaatgtcgatctttgctgggtttctggtctatcgtcagttcgtacacagggaccggatccttctgttgggtacaagtcaatgaaagtagaatagatgaaatttaggtgtgaaatacgctggtctagcctggatcaacttcgaggaatgcatgaggagctgaggagctatggagcgatgcaacgaaagtgtaaacacgggcccagcaacgcgagccaaagcacaagctagagggcgagggcgctggtctgcggatgcaaagttgccaggcgagcggcaagttgacatgccgcgccggatcgtatcaaaagggtatataggaccggggaaatacaataattgcttcacgatgcaccgtagcagacgcaagaagtatgagtttgtcgaggtcgaagacgggacttcataccaacagagcttgtactgcagccgctgccccttggcgccatccatgctctgcgcgtcctgtaagttagcgtagtattcaccaaaccccaataagtgaccgctcagcttaccgaactcccagacgcatggtccttgccctcgcctttgtacatgctcggccgtgcgtctcctgatccaaggagtctcgaaacccatcacgctagtcgctttctgtggtccgaaccggtggtccatgaacatgacggcatcatcccatccgcggttgagtccctcccaaaaccggtcgtgttccttgggtccaggctgtgtggtccaatatcccgtgtgcgagtctatcagagaggtccggaagactcaactaagcggatacaactgagtcggtgcgcgatcgcctcttagacttaccgaaagcgtgctgaagcctaggttgtctgtcgccatcaccggcgtcctgtttcttgaccttgcctccaacccatccaggcaggatctcggctatacaggcgtctttggcgctccatccggcatcccatccgttgcccttcttcagagtccagaagtaccatcccgcacaatattcttcgtagagagcaagctgagcacgcaggaattcccgacgctggcggtctttctcagtgtcattgcatccatgaggaaaagaatcagggttgagtgcggccgagaattctcccacgataagcgatcgaccagagttctttgaccaagtttcaaaggtgtgcttgaactgttgcgacaggacctgggcgtgttgatcgccgctcagccctcggtcttctgcagtgaaacaccgatacaaatgatgatcgatgacaaggaactcgtcgggatgctttgaagggtactgcgagtaccattgggcgtcccacgcgtcgtgaatgtatctgtcaaagtgagcggtcagagaggctgtaaggagattcactctgtaggcgaatatctttcccgcttacagagggaaccaaggtcctgctatagctcgaagatctcgcatcgtggaatcgtaccatcctcctagggtctggttattcttgggctcgttcatcaactgcagtccaacgacgtgcgggatcggagccagatattgcgtgaggaaacgaagtgcttgtgcagtggattccaagttcttcttggaatcccacagctgtgtcctgccagacgaggtgcccgaatgagctagagtcggaagattatctggctgagccggtctgtgcgccgagttgtagtttgaacaagacctaccgtcatcattctgattccctgcaactccatgcaaatcgatgagtattcccagaccccatcgctccgcatcctggatcgccttttcgatcctcggccaagccccctcatatatctgcgcaaaagactcgaaatcggtctttttcaagcacgctggacaggccttggggtttgcaaggtgataatacccgatctgccagaacacgatcgtcagatccaggtttcgtgccagttttctctctcgaggcctatggtgctagtactgacaggtagccggaccgtattgaagcccttgtccacgatccatttccagtcttcctccgtgatccaagtatcccaatgtctctcaagagcttccttcccgcctgacttcgctatatcgtgctttgttgccgcaaataagcatcccgtcagaaatacttccaggatgtgaagagcgtgtgccttgactcacatcgctagaacgcggttgagcagccgacttgaacggctcgtcggcgatccacgcttcttgcgagaaccaggcgcctgcagaggtacgatgaccatcccgataagtgcaataagctacgtccgcccgcctacctcagcgaagtcggatggactgaccgagattgataccgcgttgtttcctaaacctgactacgctctctgacccgagtggcaagtcttggatctgacccggaggcagtgtgtcggttgatccagcgacgtccttctgtgctcctgaagactggccgatctgatctcccagagctgcggtacccctcgctttgattttatccagcagacccatagttcaaccagcaaatgttcacaagctgaagacagagccgagcttgatgatatccaggaaagagccgggtcgaacgtctttcgcaggcaagtttcagatgactcgaaattcgatgcgatgtgcggagatgtacaagcgtttctgatctcgaccagggtatcaggatgaagttcgaattcttagcggtatgacgcacaaagctaccgcggagcattcaacgtgttttgatccctggtcacgccaagattacagaaacgtggagagactagtggctagctggctagtgagggctgtgtgcgaccgtacgtcgatcgtctggatgggtacttccagctctcgcaatcagaccgcaatcgtccgcataattatcacaagtcaagctggagtacttggatgcgctacgtgctacatggtaatcctgagacttaggatttcgcaacgaacacggcgatactttataagtcatcgagtgcaccgttcccctgatgccatcgatgacatcatcaaacatcatcatcgtgatggctatgaaactgtgatcgccggcgaaagtcgtagtagccgagggaatgctctagcgaacatcttgtagcccaatgacccctgtcacccttgaccacatggtaacgtctcgagcaatgacacgactggatggtagaactctgatcgggtggttccatgttcaaccgcttttctcataaagtgagtagtagatgttggcccgaacgtaggtgagatgacgagtgaagcgcgtgagaaagcgtctccgaggttccccggcgggcgggagcgtgagcagggaggcagcgagagagagcaggctagccagagagagagagcgggatagccagagggagggccacgcgtagagtagtgagcgagagcgagtgagctgagggctgacgacgatgcgatggtagcaagcaagcaagagctagctaagcttggacggccgagcaaagagcgacctcgaaacagagagtagtccaagtccaacaactaggtcgatcaactcaagacgcctccagcatcatccgtgcatcgagagttaggatagacttgcataaacatccgtccgcttcactttgcttgtcgacgtcgtcagatcggggttctacataccttacctcaccgctgtcgttcctggacattgcgaatcacttcgcaccttttgctggacctgcataccctttacaatccttcacgtcggcacatagacggcggactactcctccccactacaagtccgacctgatcaggaggggatagacgttatagataagagttacaagatctagattcgtttgccgaaaagacgtcggttcttgcgatatggtcagtacccatggaggtgtttgaatatcagtaccaacccgacagttccgctgacattcccttcgattgaccactgcatgaatcccctgtatcacttcgatacattcctatcaactcgtcttcatagtctcaagcatctcatcccaacgaagaggaagtccaggacatcctggtcgactctgaaggaacccctgaatctgtcaacacacctctcgacgggaataacggtcaagcacctcaagtggctcctcggctcaactggccaccgtggtctcagctgaacgaggaccaacggaactgggtccgagcaaatcccgaggcgttgaggtattaccagctcgtcgcccagcaggaacgcgcgaatgggggcgggaacggcgagggagacatggatatggacgaaatgatgatgaccctgcccacggttagggatggagaggccttcgcggcgaaacatatgccggacctgggtcaagaggtggacgatttccaggtgcagacctggaagattgagaactggagtcaacagggcaagaggttgcagggacccgagtttagctgtggtggccacaaatggtgcgttccgggtcgagaagaaagttcgttcgtcgctgtgcacgtctgttgatcactgtgcgcgtcctcgcattccaattggctctgccaggagaatactacttttcccgcaaggaaacgccaatggacagccgaacgacatggtctcggtctaccttgactatgccaaccccaagacggcgccagagggctggcacgcttgtgctcagtttgccctcgccatttcgaatcccaacgaccctagcatctacaccgtcagccgtgagtctcgggcggcttcgagctaggcgatgcgttcggcgggactgatgatcgccgggactcctcgctagacgctcatcaccgtttcgtcgccgaggagtgtgattggggtttcacccgattcgccgacctgagaaaactccacctgcccaccgacggacgaggtagacctacgattgacggagatgaagtcgaggtgacggcgtttgtcagggtgttgaaagatcctaccggtgtgctctggcacaactttgtcaagtgagtgttgaaaccgggtgtgtgctcgctgtgtacaccgctcatcgaccgggaccattcgtagctacgattcgaaaaaggagactggtttcgtcggactcaagaaccaaggagctacctgctatatgaactcgctcttacaatccctcttctgcactccctacttccgaagagcagtctaccagattcctaccgagaacgacacgccatcggagtctcttcccctcgctcttcaacgagtattttaccaccttcaaagctcggatcagccagtagggactaccgagttgaccaagagtttcggatggaagagtgcagacgcgttcatgcagcacgatgtgcaggaatttagcaggattctccaggacaagctcgagaccaagatgaaggtatgtcggcttctgcggacccgttttaggagtatggtgcactgacatcatgcgggtttgatcgtccttgcagggaacaccggcggaaggtgccattgcaaagctgtttatgggcaagatgaagaattacatcaagtgtgtcgatgttgcctacgagtcatcaatgatggaagacttttacggtgcgttcgagtgccaaatgcgaggccggatttgcgaagctgagaccatccgttgtggctcaaagacatccaactgtccgtcaaggggatgcgaacgctacacgattctttcaaggactatgtgcaggtcgagactctcgagggagagaacaagtacatggctgaaggatacggattgcaagacgccaagaagggggtcatatttgagcgcttcccccccgtgctgcacttgcagttgcgtcgtttcgagtatgacatggagaaggatgccatgtgcaaggtatgcagagttgatcatgtcgtgatctccttggcatgcgctgatgtcgaaatctttgccgttctttagatcaacgatcgacacgagttccctctagagatcgatcttgcagaattcctggaccccgagtcggacgagcgcaagcagaatcaggtctacaagctacacggagtgctcgtccattcgggtgatttgaacggtggtcactactttgctctgatcaagcccgagaaggacggcaggtggttcaagtacgatgacgatcgggtcgtaccggtcactgacaaggaggtcacagaggacaactacggtggcgatatgaacaacggccttgtcgctcccaaccagaggcaacaaccgcgaacgatgaagcgattcacaaatgcctacatgttggtctatgtacgtgatgaggctatcgacgacgttttgaaaccgtttggaccggatgataccccttcgcacctgagtaagtgtggatccttctcgtacaggctcgcatgatatcaaccctttcatgattatcgtagaggctcgtcttgacaaggaacgagctgaacgagaagcgatccgacgggagaaggatgagcaacacctgtacctgacagcaaaggtgagctgcgctagacaccttgtgacgagacagggtaccaaacaagtcgcaacacctagattatcaccgacgaaacgttcagtaaacatcaaggatttgatctggcttccttcgatgagaagcacatcccgccttccgatcttcccgctttcagggtcttgaaatccgaaccattttccaaattcaaggagaggattgccgagcactaccattactccatcaacgacttcaagttgtgggtcatggtaaacaggcagaacaagaccatccgtcccgatgtaccgatcttggatagcgaagccaatcagagtaagcgcgttctcgttctgcaatatatcgcacggttcctaacactgactgcatgttcgtttggacttagccatggaccaaatccgatcgacaatgactgctcgcacggctgatcttcgtctgtacttggattacaatcccgacccgagcaagtgggctgttgtgagtactgggcaggagtcgaatctcactcacgtccgctaatcacgatatcacttgacaggctgttggcgatggcagcagtcctcctatcatgatcttcctcaagtggttcgacgtccagcggcagactcttctgggacaaggcaaggtctttgtgggcaagaaccagaaggttgcggaattgtgccccctcatttgcgagcgaatgggttgggccccaaccacacctctcaaactctacgaagtaagcagcagccgcgtatacgttacgaaagtaatccatgttaatatctttcccgttcatctaccaggaaatcaaagctgggatgattgagcagatgaagttgcgtcagaccttcgtgacaagcgaaattcaagacggagacgtcatctgcttccaagccgaaatttcggacaaggagtaagttttgaacagaaatatcgagtcataccaaccctaacttgatgcgcgcattgcctcctcagacaacaagactttgaggcacaccagctgtattctcaagtgccgcaattctacgatttcctgcagaatcgcgttcttgtcagcttcaagcccaaatttgaggagatcaccgagacgaatcccgaatttgagctgatcttgagcaagaagaacacttacgacgtggtgagcagtcgcggccacttctgtcaagtacactgaggcaacctgctaagttaacttatattatgcagatggcccagcgagttggagatcacctcaagcacgatccgctccgcctgcgattcacctcggcaaatgcgaacaatctgggtcccaaggccgtcatcaagcgagctctaaaccagagcgttggcgatctcacgcagaccggattttacggacaccagcatgtgaatctcattttgtattatgagaagctggacgtcagcatcatcgagctcgagacgaaaaaatcgctcaaaatcacatggacaggatctcacaacaaggaggaggtgagtcgaccggtgtcgctctagatgccctcgaccatactaaaccacttgtggtattgcgatagtctactcatccgttcttgctacccaagaccagtaccttctcggacgttgcggaggcactgtcgaaactcgtcactctcgatccccagggcagccgcaaggtgcgaatatttgagatcgcatctaacggccgtcagcaaaaggaatgtacatcgtcagagatgatcgccaatctgcgggaaccagcagagctgtacgcggaggaaattcctctagaggagaccaatttgacggacgacgccaaggtcatagacgtgttccactatcaccgagaacccacgcgatactttggtgtgcctttccgctttgtcgtgaagaatgtgagtacaagatctcaggcgatccggcctgcatgcgccatcgtgctgatattaccttgatattttcccagggtgaacgtttcgaagacacaaagttgcggctacaggctcgactcggcgtcgctgacaaggattttgccaagttccgcttcgccctcatgcaatcacaccaatacaaattgccgtcgccgttgactgacggtaagcaaaaattcccttccttaccgaatcgagaggaaagagctgattgcaaagatcattggcagacgacgtactcttcgatcacaaattcatgggccaggatgcactgggtctagatcacatggacaagggaccaagaaaacccaacccgacggaacgggccatcgtcattcgataacttctctatcggactgatattctcctctgctgcagaaacgatttgcatctgaaagcattattatccctatgtcgattgtatcaaaataacgaccttctccagcgcgatgtgctaccacagcatcctcttattcaatgaagcgattgaccaacgaacgaaagccgtgccacgcccaccttttatgctgtctcagcggcgacgctttcagatgatcgagaagacaattagggtcagaggtacgtcgcgagtacgcgagtagaatatgaggtgtacttgcgcctatttgcttccggggacgagcatcgcatcaaggccgaacctggcttagcttgctctcccctttgacgacatcgtcgttgaaaatccgaacggtcaaatctcctgcctggctgcgaaacacataagaaaaaaccgggtcctcacttattgaatagcacaagaacggcttctgagcagtaatcgataccctagctgaggcgggctggctggagtattgacgcattagtgaatgtcagactaaagcgttagctcggagatcaaggtggaatggtaggccttctggtaccaccacttggattaggccgggagtgcgaccagctcatgtccgtgtaatcactctgtcataacaggacagaaacctgctcgtaaatgagctgcagtcgctcgttgtggagagcaagcgaaagtatcctgatgtgaaagaggtacgaatctgcttgtagacgttgaactcggtggctcaaactggtctcccctcatcttaggcagccgaaagggctcttcttgtcctgaagaccacaactggatctcatttcacgccaggtaggcacaccttttctctgcttgacttcattctgtagaccggccgggacgatgaggcaatgttcttcagatgcacgccaagtcctgctgttgcccgtcttgggtggatgcaagacgaaggtggccaagatcgtcgccatatcaataggagctctgcagcgactcgttagtcttcagacagtaggaggagtgagtctttatgccgcatgaaacatattgcgaagctgagtttgttcgatgttgttccaggcagcaatccccgctctcctccagacattgcaatccgtcgtcaatcaaggcgtagagattcagttacgcatcgtacaaacgctgctgctaatgatgacatactgctctgatgttcatcgagacgtccttggagaggtcagcattagtgattaggttgacgtacatatgctgacagacttgagcctatcgcagttactgtcactttacttcaagctgcaggactcgaagacgtcggtagtctccagcaccgcctccgcatcattacgccaagcgatggtgttggtttttgaaagagttcaagacgaaggatcagaggcagacacgcaaacctccgccgtgactcttacggatgggagtttggtcaatctcaacaggaacgagtgggatgcgtaccatctctttgatgacctttgcaccctgacagccaagtcggtgctgaagaatagcaaaaatcgagccgagcatccgcgtctcctgaagatttcatcaatcacgcctacgttcggactcgagctaatcgaaagcatcctcagcggctttgcaaaaggtttccgaagtgtaagggtcgtgtcgctttgggagctaggctttaaatttcgactgaaccagaaattgccgtctagcaaaaggatttgatctcactcctccaagaaagactgtctccgctcttggagactgtcttagtagagcgggctcctttcccggttatgcttcgcacggtccgggtggtgttcctacttttacgatacttcttcgagcaaattcctacccaggccaaggctttttggcaaatgctgattcgtggagcctgtaacgaagcggatcttacgggtggaaggaaccaacgtaactggaagattcccacaacaaccccgccgttgtggcttcgagcgatgttactggaagttctcaaagcgtaagctcccgaaaagattgcttttgcattagactgtggctgaactcggacgcctaacagactctgtcgtgacgcctcgttgttgtctgctgtttggcaagcctttgatgctggcggcgagtgttcaatctacggcgatctggtctttgcggtacgccaaattgttaccgaaaagccagcggaattaggcatcaacgagacaatgcaaggtatcggcacctcgcacttgaacccggaccattcagtgaggcagggaggctacctagacatgggtctgaacgcggtgtcttccgccgctacagctggggtgtccacagtatcggcaatgataggtacggaaggagagggcaagctcgatgcaagctgtggcatcaagacgcaatggttcgtgattgcttgttgttcgctgtgcgggaatgcctagctcagatgatcgctgttatccccagcatcgagcaacatgacaagatcgatccaaaccctatacccgaccgatacccctacttgcttgctctcgatatgcttgtggagatcacggacggacttgcggtaggcctttacgcagaagaaacgcccacggtcgcaacccccgaacacgccaaagatgaggatgtcgtggacttatcggatccatcgtcagaaatggtaacgggctcattcatcaaacccatgttgaacgtggcctggccagcactgttagcaagtctagccttcgtaataggcacgaacgtctcggatgacttgttcgagcgagtgatcaaaactttcaaaaccttgatcgcgatatcggacgctacggacctcgttacaggccgagacgccttcctgaacacactctcgcgcttcgccgtcccggcggctgtcgtcaaagctgcgcaggtgtatacggaaccccctcccactccgggtatagctggcagcgataccttcaaggtcaataacagctctatcacagccaaagcccctgctttgtctgaacgaaatctgacctgcttaaccgccctaatggacttggccgaggagcgtggtgacagtctatgctctgcgtggcacgacattctagagaccgtccaaaacgccaattttgttctcggtaaacaggccgggttgaaacgggtggcacgaaatcattcggacagtgcacccagctcaccaagatttagcacatcgtcgaatcgtccgaacgccaacacgtctcaaccttctcaagtcttgttcgaagccgagccgagcagtgttcaaggcagcatctatcgcctgatggccatgactagccgtttgagtgatggaagtttccagcacgttctgtccgccatctgcagactaagtggagaaactattggacttggtcaaactcagcaagcgtcagaggaagccgggtcagtaatgccgggatcgccggctccgcgttcctcggctctgggaggaacactgcttcgtcgtagtagtggtttagcagtctcacagactatcaggcaaggtgagaggtcatttgccttgatgatgttcgacgtggcagtgtcggccaatctggagcggatcatcactcagccaacccagaccgcctggaacatcatcgtcacgcatgtgatcgatattgcccaacatcaagccaccccggctgttatacgtatgcaagcggcagaagcgttgggcaacctgctgaactcggcgactaccaatctcgagatattggacataggagtacagtctcggttgcaacagcaagtcttcgaagcgttgtctcaacaagtcagagcgcttcctagtgcaacccagaatgcgaccgatctagagatccgcacacgaggtctaacgacgctctcgaccattttggaatcttcaggccacacgattgcatcggtctggccggctgtattccgcatcattgacagcgtcttcagcgccacgccagagatgctggcaaagggggggagtcaggccagcaaagcgcagaccaacctcattcggacagcatatccttccctcaatcttgcatgttccgattatctatcgacattcgatgcaatcatcgctgaacactgtctggattctctttgcaacttcgcgagccagcaatttgatatgaatatcgcgttgtcatccatcggctctatttggaacttgatggatgcttttcagagcggactcatcgacatcccctccgaggatcgaaaccgactctggcttcgcagtctggatggtatgctgatgctgacgaatagcagaaaaagcgaagtccgcgccagcgccgttcagaccatgtttcgctctctggaaactcatggatcgaacctgacgagcccgacttggaacgccgtgataacgcgggttttgttacccctgttgaataggatggtttcaactgctcctcaaggccgtcgaaatggatctattgctgaagacgacgccaatgggtacgatattgacgagtctcacacgcttgcgctcacgtcgatcagggcaatacatcacacgtatgcctccctcatttcgacgagtccagattacctccttgtggtgcagcaggctttggccgtgacactgcacgcttgcactcaaggaggatccaaaacgtgctccgctgctttgcgattatctcagcagctggttttaaactttgggaagtcggccgcgagctccctgtacatgtcagcgacatggtcgacgattgaaggcattcacaacaagctagaaggaggtcaagacttcaacgcgtcaggacacaagctaactcaggacagcttgctggagtatgtgcgacttctggaagtcgtagtagatgcggctccaggagagctcagcgaagctcagatggagatgctgcttcgggcaagtcgatctgcgattacctatacacatagtccgacctatcccctagatggagatatcccgtctgcactgcaacaagctggcctcgatcttctttgcaggccaaggctacaagagaggtgtcctgctggattgatcatttcggctctcgccgaatatgtgacattggcgttcgttggcggatttgactacgtcgatacctctatgcctggcgccaaacgcacaatcaccaagactgtctgttatgtgggtctcgccaaagccaccatggttctgattgtgaccttcgtgcaaggcgattcgttatccttgaaagcggccgttcgagacggcagcattgagaggctaatcggagcgttagcccttcccatcaaattgagactggattgtcctccggccaacaagtttggaaaggacctggccctctggaagactgccacgtttgcctttgtcgaagtcatcaaacggactattccccttttggaaaccgtacctccaggcgacatcggctctaattgggattccctttggcagcaaatcgttgcaaccttccgttcgatactcttgactgacgattcttacatgaccgatatggaaatggaggaggccgaaaaggaggagctatgtgacatggctgctatcgaactcatcgagacgtctgtcaagtccatgttgggtcatccgagaatgacagaagcctttctcgcacaattcgcagatttgctttatcaagctagcgtcctttacatgccgtatgcagggagatcttaccgggccggcgagactgacatcgaccaagagacttcagtgtcgtctctaccacggcaggatctgagatatcgatgtctcggactgttgtttgatagcgttggcaaaggtattcagggtacgtatgcagttgacggggcaagactcgaaatcgagacttaccaactttgcgtcgcaaaatgatagatcacgcggagtttgaagcgcgccaaaggcgaactgccacggctatgctaccgttactcctcagccgttgcaaaggggtcttgacgggttacttggcatcagcatcgttgcggggaagttatccgtttgagcgggtcagggaggaggaactggcctacgttgtccggcggctactcgatctgaaattatggtctgggtccttcgactcgatgcaagccaccggtaagttgaaagcatgttgtatcaaagctttctcgctgccaaagctaatcagaggaatttcttggacgttgctcaaatagcgcccgaaacccagagcaatgctataggcgaggctctcaggcaatcttcccgggcacacttgttccacctataccctatcctgctggaactggtcgcgtcgccactacgattgccggtcataccggtccgggttattgatgtcgcggagaaaaagagcctctctgacgaaacgacaatcggagatcctggtgcggaagctcagcgacatgccacggaactcgatgtgagaaagctagcccgggcttgtttggatgcgctgggcaaagagatgggcgtgtgaacgcgtgatccagaggaaagtcgatataccaaatcagttgtaatgtgtgtacatctccatgccatcgcggctcattcatcagacatcgttgatggcagtgtttacatcgttgtgtttggtccctgatgcctaatagttttgcgactgattacagctgatttgcgtcactttggatggggtgagatggccgcgcgatgatagatggcaccagttcccgctcagatgcctgaaagtagtggccggtgctatggatgattcttgctcttcaatgggcaaaccttgtaccctctccgaaattgaataagttgacgagttaacgacgcaaacgtcggttacgtccaagttgcagtacgaatcagcaagccccttctcaaatggctatatcaacgcagtacgaatcttgtcacagatcacatgcatcacatggtcatcatgtcgtctatgtcattggctcggtgaccttttagcttttgaaacgggaacgaccaggatcaccatccagaatgggatcgacgagccacgttcggggacgcctcaaggtttgatcagatcattccttattgcccgacagcgcgaaacaacacatcgcttcgtaacccggaccggatagaattcatcgagcccgtcaaggacggtatatcatggcgacaaagacgcaagacgcaagatccgagaatatcggggattatagccgacactttgagctgattaccgggctgattgtctcgtccgatcagtcgtatcagtagatcagtagctcagtagcctcagtagctcagtagcctcagcagcctcagtagcatcagtagacgatgtcagtcggatcagtcgatgataccgtcctcttctcgcgcctcgacgccaccggccgtcgcttatcgcacgagacacacgatcgatcccgtaatgaacggtcgcgtgcccgcttatctccggcaagatcgtatcagctgggccaaggcagaagcgagtgcgagggagcgggaaggagcaggcgctggacgagggcggggcgggcattgcttccggaaatgatagaactctgctgcttcgcttcgactttcgctttccaaggtggatttttctaatccgagagcgggtggggaagttgcgctttgcgttatcgctaaccggcaggtcggctcgaatataggtaccaacgtttcttttacagagacacaagtacacggttacggatcagcatcaccggaaatcatcatctttctcttttcctcttcgccaaagtttcttcaggcatcttgcagagttccagcttggacgtaactgtcacggatcgagtagacaactcgcaacctcttatcaactagcctcgatatgggcaaattctctgcggagcgtttgaacgaccgggtggcacggtcggcagtcggcaggtggttccgtctggatggaagcggtcatcccttggcgaggaagggaagtagattcacgaccgagcttcgagctgggagtgttatcggcgcggccatgctgtacatcatttctgtcaactcgtccatcttggtaagtcacctcgtctttttttaccctatcgagattacacgagtcctaaccacggatatcgtcgtttcgcagagtgactctggcggtccatgcgtttgtgattcgactcccgacgaccctatctgtgttaccaacgtcgcctacaacctctgcatcaacgaactcaagcgagactacgtcactagcacttcggcaatctctctgatcgcgaccttcctgatgggcgccttggccaacatgcccttgggtctcgctcctggtctcggtggtacgtggtaatcccgtcgggttgatgaagcgcgagcgaaacatgcccgatgctaatcagtcggacttgatttcgaacagtcaacggtatgcattcccgctcttaaggcggcttgtctcgtgtgcctagactgaccagatatcaatgacctcgtggtgtagctttctttgcctactcccaagtcggattccacgtgagttcgatcgaaccatgtgttcctgtttctttgctgatagcatctgcctgatcgctctttccagggtaccggacccatcagttacggcgaagctttggctgccgtcttcttggagggaatcatattcttccttctcaccgtctttggtctccgacaatggctcgccaggttgatcccccgttcgatcgcgctcgccatcggagccggaatcggtctcttcttgaccctcatcggtctcagttcgtccggcctcaacgtcgtgcaaggtgcttcgtcgactccgctacagatcggaggttgtctgccccaatacgaggtggacggtatctgcgcgtcacacgtcctccaggaccccaagatgtggttgggtatctttgctggcggaatcatcactgctttcatgttgttgtacagggtcaagggtgagtgatcgtcacaagctcttcgacaaaacgcagcagctcatcctctatccgacctgacaggtgccctcctgtggcccatcttcatcgtcgccatcatctcgtggcctcgaagcacccctgttaccaccttcccccataacgagattggtgattccaactttgacttcttcaagaacgttgtgagcgctcgaggcttcagcctactcgggcccaaaaacgtcgactggcagggttacaagaacggcaagacctggatcgccttggtgaattgaaactcgttcttcgtcgctgtcgcctgcgctaacagccatcgatgtatccagatctctttcctgtacgtcgatctgctcgacacaaccggtactcttgtcgccatgtccaagcaggctggcttgttcgacgccagggacggtgactttgagggaagctctgtggctttcctggtcgactctgcttgtatcgccatgtctggactgttcttcggttcctctccgtgcacacctttcgtcggtgagccatgactcagtgttcccctcataggtacccatcctaagccggaccgttttgcgtgcaacagaatctgctagtggtatcgccgaaggtggaaagactggattgacagctatcgcaaccagtttctggttcttcgtcagcatcttctttgcgcccatcttgagtaacattccatcctgggcgaccggatccgtcctggtcatcgttggagccatgatgatggagaacgcgaccaagatcaactgggactttattggagacgctttgcctgccttcatcgtactcgcttgcatccccttcacctgtaagcggagcttgcaatgctcgtgaattcgcatcaaggctgactcggctaatcttacacagacaacatcgcgtacggtatcattcccgctcttatcgtctttatgctgctccacaacgtacctcgtgtcctcggcatgatctcgcctcgtctccttcctcccggttggcacgacctgaaagagccgtactcggtcgccgccatgattcgtgctcagtccggcggccaaggtcgatccaagctctgggccgtcttgcctccgtggatgcgaaagctattcaatggcaaccgcaagttctgggcctacacgcctgaagagatcgagaggcatctcgaaggcagaaagatgaccgaggatgcggaccgagccgctgccgagctgcgtcaacgcgaacgagacgacatgaggaaggccatgggtctcgctacggtgataactacccgtgatgttaccgacctcgactacgatgccgagaacggctcgcccgcctcgttcgaaatgcaagatcccaacaagcagcacagggaaccccaggaaggcctgtttggatccaagacgtacgagacgaggtgatttgaaggtggaatcacccaggcttttgcgaagtgtcgcctcaaggagactttaaagcacactgtgtatactgtagtttcgaccgtacatatataatacaaagggtatcgaggtcgacgttttacacaaatccgttcaagcggtcttgagatgtttggatcgcttcgtcaagttggccgtctcttggaacgcagtgaaggcaatcccaatcgccaacatatggaagggattgacattgtgccagatacgtccaacctgccataaaccgtatgcaacctgccgatggcgatgcggagaaatcagatgctgtgaatagacgcaaccggatgaacttacagccaacccgaggaagaacaagttgacccggtttgttccaagtgccgtaagaatctcgtcgtttctacattggacgtactccggaccgtcatacaccctgcaaggcgatattttggtcagcctaagtagcagctggatccgcatgcgatcgttactcacttctgacgctgacgaacggtctcggtgagttcctgatagaagtgccggtccagcgggccaacgtagtctgagctgaactcgaggggatccttgtggtcaggcaagcagtacatcgaaccaggcctgtggatgtgaatacccttcagcgtgagatatttgcatattcgcagagtggtgcacttacccgtcgtcctgcgtaacatcccgtacgatgtgtagcacagtcgctgcaacggtatcaggctgaaccacagacaatccggccaaagctaggtagacctgtatgagggacggacaggggcaacttgtcaatgtgtaaacggatccccaatagcgtgtcgttctcacctcccgaccgaggattccggtgactgcgatcacaaaggcattcagccaaccattaattgcaccacgttgcaagtaggccaacttacaagagaagaagggacagatggcatgacagctgcgggtcaccatatgttcagtcaagacgataacgttgctcgatccagcggcacgtacgagaaagtcggctcctttgcagctctcagcttggcacaatatgctgtccagaggcctactagcccgtgcttgcttgcgctatagaggggagctcccgggatcccgctgtgcccacctttattggtatcgaaaatcgtcgcgatcagaccgagccccgtttagtaggcgaccgcccatggccttacccatggatgccaggaggatgagttggcggttgttgccggacgaaggatcagcctcccaggatttctccgcaagttgtgcagtcagaaggacaccagaaaagttgacactcagggtgacgaggttgggttcctttgggtatcgacctaattcattctctatcaaacgaaagccaagcgtacatcaatcacgatattaccgtacattcttggtatgagcttactgagcggaacgtcctgggagagccttccgacctcggttatgcctgcattggctacaacaacgtcggccggtcgaccgaacgtcgtctgagcgaattcgaagagccgccgaagtgacgattcgacggtgacgtccgaaggaccggaaggagcttggcatgatctgcttgtgagactagtaagactcgcaggattctcacaggaggtctagttgtttgactcaccctgagagaccttgacacatcgagatggttccttccaacccttcggggttcaggtcgccgatcacaacgtcggcgctgcacgcttttgatgttgagctaaagccgtgtagctagttacatcttgatatgctcaccctgcggttgcacacatgatcgccaattgtctcccaaatcctgatcctccccctagaaacaagatctcgtctcagtcgatgctcgaatcaaattgccactaccggctatcaagtacctgtgatcaggacggtttgaccagacaattgggaaggcttgatcgtctttaaagcatcgatacaaccttgaacaggcctcatatttctatttctacaggcttcgtgccgacttggtctcgtgatcaacaaagctgaagacctttatcgtacctttgtcggagcgacctcgtgcaaatatgtagaggaagatgatctggtgcatctggtcgacttcctatgcatggtaaccggtcgaatccgtgtattgcatcctcgaaatacgcgtcgcctcgattcgagacgcggcgtttcacccgattccacgcactgctaccctggctccgtatttatagcagcgcgcacgaccagcctaccaaagttcacagctatcatgctcagcgtatcccagttaccaagatcatgagtaggagtctgatccttggcttccgtcccgcttggcagggctgcaactgtcgaagtgctcgaggtcgtcgtagaggtaggcatcgcagaggtagctgccgagctcgtagagctcgtttccggaaccggtacccagctacttgacgaggcgatactttcaggcgtcccggtattcgactgaagtaaagcgattcccggccttggatcagacaaattccttcgcatatactaacagtgcttacgggaatccatgaggttgtttccgaagcagaccacgttgcgctcggctgtgaagaccaccactctgtagttgtcggctgttgccacgtggatgtattggtcgatgaactggatgaactggattgccaagaactccaagaattccatgaggtgttctttcggagcgagactgtcgatgcacgttctcgacgatataccagctagtcagacttacgtcagaaaccggcgtggcgcttgtccaagatgatgacgtccagggctgttctgttggtgctgccgagttcacgctcgttgttggctcggggtcgggcgtagaattgggctacacagatttgagcaatcagttccgatgtcaggcatgattgaccggctgatgactcacgccttcgtcattaaaccaccaattcacgatcgcagtaccgcttgcttgaggtgcaaaattcctattgacgcagagcttcttgacactggcttcgattcccgaaattccgccattggtactcactgaaacagcgccttgctcatgtctattgcaccccaagggcatccgggacacctgaacgtgcagtcaatactggcatccgaatacaatctcggctgagcatgatggcgaagatttacgcacatgtcggtgatcactgcctcggcgaatccgtcgtagacgcccccttgtacgctgatccttcggccacagttcggtccaggatatgtgttcccgaattgagcggcattcaaagctacgacgtaagctggttcatagtccaccggtccgccacatgcaccttgtccgacctatcgaaaaagctttgcttagtgcggaagcctacctagatatgatcttaagccttacagcgtaaaatgtggctctgccttcgaaggctcgcttctgcatccacttagcgggagcctcaacatcagacatggtcgtcgtgaggttccccagggatacgtctggggcatcagctaccgcatcttttcgatgccttctgcttctttgggcatgaccgtctcttcccggatcctttaaatccttgtggccagtgtgaccgaaaggtctcgcttcgacgtaaaatttgagagctactgctagagtaacagagctaatataatgcatgacgcattcggattaaataaattcttaaacgggatagtagcagattttgcatggactttgcaactctttgaagcggctgcaagaggagatgaataacgtccgcaccattcctgtccagtaagacaagatacaatgaacatttgactgtttgtccctttgtctcgatctccttcggtcaatacaaggtgtgcacctgtggcggaggtatgaaacgtcgacgtgtaacaaagtgtacaacaggtccatgcgcgatgcgacgtgcgacacttgatcgctcatatccgctgacaaagggaggcaaaaatcaaacatcggaagcaaaaatcggataaccatttgattccgagattctccggaagtagctgtaccgaggtcgaggcggtcatctagcatcgatcgctctttgaccatcaagctatcaaaccattccaaacaatcattgatcccatcgcagtgacacacctagactcgaccacagatcgatgcaatagctcaccatgacaagtaaatccagcaagggcaaagcagtcgatccgaacgagcggacaaggctcttgcccgaagcatcgtcctcatcccgttcgaccgcttccggatcgctgacggccctcgaacagcgttcaaggtcaagcatcgtcgtccccggccagattagggataacgaagagaccgcacatgttcgaagaaatcggcttatcaccgcgttgatcgtgatctgtacaatccttcttactgccatcctcttcctgggactactcttgtcatcctatgctccatcgccaaaggagaaggactcgctatccgacgcggtcctgattcacggaccgactgacatcaaggtactcaatatcacctcaaccgggatatggctcgaagtcgaaggctatgcaggagtcgacgtggaccgcatattggggatccacagggccgaggtcggagagggagagagaggtggaggtgccaagtggtgggaaaggttgcggaccgagttcggacgacttgcgatcgacctgatcgggcctgtcgaagtgagagaagtacaaggccttcagatttggtcgacatcgaatgagccggaacgattggtgtccgtgaaagttccgaatgtcatcccgataccattggctacccaggtggaagcattgcagctcgaccataccatatgggaaattcccccttggctggctgctatacgggtaccggtacatatcaacccagaggccaccacttccaaactagttggtctcgccaaaaaagcttggaagaccggttccatcgacgtggaaatccgtttggcaagcgtaaccgtgcaaagccggcattcgcgagggtggcgaggatacgtgaagcatacggaacgaaacgttagggttcccttatctgtagatggtgagtgatacgttacatgtcctgcctctatgtcgtctagcgaatcgcttccgaatcgcctacaaacctcgaatgcttcgcctcgcgtttcatcccgatcttaatgcccaacgatcggtccttcttagtgccagctttgaaagaagtcacacccagcatcgcgtatttcttcaacctccctcataagctttttgaagccaccttcacacccgctatgcagacctttgccaagtattggcagagttgaataattcgtcagcaagtcgttgcaacctgctacagaacagctgtcactgacgctctacattcggatgccctttctacagtcccagacctgcccaacattcctcgaggcgagatggatctggcgaaattgatccggctggaatcgtacaacatcgaaactacacacttgaatggcacagcgaaagactcccgcctgcagatcacggcgctcgccagcgtgccaaatccggtcctcgggatgcaattcgatctgccttacagttttggatttgggatcttcttgcgagtgccttcgggagacagcggagctgctgacacgcttttatcgcggaaacgagccaaaatggcagaagtggtgaccgatccgatcagcctccatggtcagcaacggatcaatgtgcatattagagggttcatacaatcggatcgccctgctaccgataccaatacaagctccggctccgatccggcgttgtcaatgtttctccgcaattaccttcatggcctagacaaccctgtggttgtgcaagggcttccgtacttgccatggaatggatctgtactcgatcgaggattacccgcgccgccatcctggatgtctgacattgtacagaccctccaaacggaaatcgctttccctggacctcatcccgcgcccaagttgatcaagtcagtcactattcagaacatgcggatcagcgaatctcggggtcagatgagggcgagcggtttggttgttgccgaaatcgaactgccagcgcagttgcgtggtgtagaagtagctgtcacaggtgtcctacctgacgttctcgtctttgatggctatccgcccgatgatggagacgttgatcctgacgacctcccttaccctctgagggcgttcggacgcattcatccggacgattacctgccggcaaccagccagccctcacaagagcataccggcatcttgatggtcgaggcacccattcatgacgtccctgttcaagtattatctggtcgcgacaaggtcatgtctgacttcgtcagcaagatcatattcaaagggggcgcgttggccggtatcaagggccgcgccgccgtgagtgtcatcgtgccaggcatggcttcggaagttcaggtgacgaagatccctgttagcggggatttcacggtggggaagcctaggttcgggtcgtgaatgatgattgtacaataaagtcacacattagttgtataccgcggagctacaattcagcgcatttgtaccaagatgaacgaacaccttttgtgggcgttgcacagccactcaggccacatcgacgacgtcccaatccgtcaccaggtattcgtcaagctcgttaagctgtatgatcatgtcgtgagcggaaatcagttctggaaccctcgacggccggccaggacggttaacattcaccttttccatgtcatccgctgacaacttgaagtcgaaaacgttcccgttactctgtattcgcttttgactgacagacttgggaataggaacgaaaccctacatgatatcgcagacctcagctgaatgaaacgggaccaacaggactatgcacttacgtgttgaatgctccatctcaacaagatctgagccggactcttatcataggcctcggccacttctttcaacacagggtgatcgaatcgcataccgcgagcaagaggagcccaggcctgcaagaaggttgattagaaaatcaatcgaaatctaatgcctggagagcgcgacttgggtggactgacctcgagaacgatgtcgtactttcggcaagagtcgacaatgtcttgcctcctcatgaaaggatgcaaatcgacctgattgagaacgggcttttcgaggccccactgctcgaactcttcgatatgcttcgtgccaaagttcgagacaccgatagacttgacccagccccgtttcttcgcttcgatacaggcttcccagcctgaagacagcgggcttaggcgaatcaagattctcgatctgaggcctcgcgttgcgacttacatgctttcctgacatttgttccgccgataggcgagtgcaacaggtacagggagatctgatcgacaagggaatcctttcgtgattgctgaatcttctttagggtttcatcgtaggaacggtttgtcatgagcttggtggtgtaaaagatgtcctgaggggaaaactcctgatgttcctctagtattgcaatgaggaagcagtaatgagctctcgtataatggaatacccagcttgtacctctcgaagcctgcttactgaggaacttctgcataccccgtccgcaagccgcctcattctcgtacctggtcaatccaactttcatcatgagagacaatatatggtccacgatattggttgagcactgaccattcagcggagtcgatatgacgatagccagcttctaaagcccaatatacggcccgctccgtctcctcgttactcatctcgtagacctggatcagacatgttaagcggcaattttcggcgtctggggcgaagacttcctactcacgccaagtccgatttgagggatctcgtttccatcatggagctgtgttccgtcagaagcaagacacgcgatatgagcacatgatcagcaagaaggcgcggacaaacagagactgattctccgtgcactatggttgattaccttgacccttccctggagattgtcaactgtttgaatggcggcgggcatggtgattgaagagcagatcaataagtgtatatgaacctgtgagcagaaatcagcatagaagagagatctagagagacgcctttgattgttctattggatctatgcatttcgtttggcctggacctggacaaagcagagtacatggtcgctagtagtcggggatcgggatgccaatctcgatgattcggtcattacgtcagcagcgaaaaagccacctactccccgcgtgcgccggtcaacgagatatgatcgataagatggatatagttgataaagagctcgaacgatacctcgtgaaaatgatacaagttcaagaggctctcggaacagggagcgaaaaacgaaggtttcgtacagacgtaaataggacaagagggcaggcagtgcatgaagctcgaggcgaaaatcaaaaggttgcttgagtaggagaagacgatggcggcgggacatgcggtaaagtcgcgtctacttcttcttcgcagcggttaccttcttggccggtgccttagtcgtggacttggctgtgatcccgcggacagctttagcaacgagaaatgctcgagggggaataataggtcaaacgtaccagcagtagccttcttgggcgcggaggtcttcttggcaggagcggcagccttcttaggggcagccgccttcttagcgggagcagcggccgaggcggccttaggagcggcagcctatagcagggtctaaatctcagcagttaatacaggcattcagagtcaagatggataccgaccttggtaggtgctttcttagccggggcagcagcggaagcggtggcaggagccttcttggcgggagcggcggccttcttgggggcagcagcaccggtcgcgggaggagcgttctctttaccggcagcaccctgtaacaagtgaagcgtcatcttagggggtgagtaggtacgtctactatgtgtcggcgtggtacgtaccttcttgacgagcttgacctttccaccggcacccttgggctggtcgaagacaccgacatcgacacctcgggcaatagccttgttgacgtggttcaagttggcggcggaagacatgtcgagcttgtacttgtcagccaagaacctatcgagatgtaaaactgaatcagtgtctgatcggaacgggtcactattcggtcgatcgaccctggacgcgtcgacttacttcttgatagcgggacgcgagactccctgacgggcgtcggtcgagctagagatgcattcctagcggaagaagggttgaaggcgcgtcagtaaaaattggtggaatggaggtacccggcgaagaatcgggcggccacattgcaggatgaggacggaatattgttgtccaaaaagcgcgactcgcagaccatttggttccttcccgaacaggcaatatcgcgcgatgccccgaagatgctctcaaaggcgatctaacagtgaattatcgacgaaaaggtatcgtcgaatgacccgccaggcgctgagttttgcctgaccccggtgaagaggcggtgatggcacgtctgttcgagcattgtttttcgcgtcatcgaccacagtcgcggtccaccgcgcacgtgacgacgtgtcccctgtggttcaccgtccctttgtaacgatgggcgcgatgatgccgcagggtatcgaatagatcggagcgaggctgctactacttggaagccaagttctccgtggcagggcgtccctcgactgggaccgcagcgatcttcgagaggggattgaacgcgttagacgcgaagttttcgttgtcgtccaatcagcttggcgtagcaggccggtcgacgagaccatcgatgtcgaaggcattcgaggcataacgggcatggtgtaggagcgggaagcgaaaataaaacgagatcaaacaagctgatatcgcgaactcacctggatcatggcctggaacgaggggtgggcggcagtcgaagccttggccttggtggcaggggcggttttcctagcggtaggggccattgtaaaggttgtaagaggtgttgtctgagagagattgaagagataaagagagaaagggcttgaagtcagagatctaaagacgaaagggtatgggagacgcgacagggagaaagaggcgactgggagagatggcttaccttgtttgagggtgagtatcgaggttgagccggagcaaagttgtgagcgcgaaagatgggacttggaaggaattcttgttggagagaacaagaagggcaagaggtgtttggtgtgagttgaaaggtaggtcaagggtcaagatggatatcagggatggtgaacgcgagtggtcatgggaggaacgtacgttcgagggagacgatggtgatggtggtgatggtggatggcctgggtggtggagggcggcgtcccaagtcgcgtaacgtccaaaacaagttgtcgccgcggagattcgtttgatccctcccgcgcgcgcgtgtgtgtgggtatgtacgtcacgctgacattgtcaatagatctcggcgtttgccggcgtttcaactcgtcaacccggaaatcgaatctctgctagatcataagttcatcgaccccgaggtcttgtttccactttcaaagaaatcgatagggtattccagatgatcaaatcgtatctgaggctttatcagactttgaaaaagtctccaaatgacgatttcgacgatcctacaggggattcgattttttcagctgtctgtgcagattcgtttgactcgtcatcctgttggtctgattcaacgcgactttatcaagaaatcaacaatttcagacgatggcacccaagacgcgctcgcgctgttcgcgactcgcgactcgcggttcgaatcgatcgagtgagagcgagtgacgatatataattctggacactctaggtattagaggtcatgcttccttctctttttctttcccctttctcatcaactaactactcaacaaccactttctcaactctttctcgactcgtcgcttctcaaccctcacaatggcccgaaccaagcaaaccgcccgaaagtccaccggaggaaaggcgtacgttcggtcttcctatcataagagtccagcagatgtcgcctgttgcacttgtgctgactatatgccgccattgcctttcatagtccccgaaagcagctcgcctccaaggctgccaagaagactgccccctcgaccggtaagtctcccggtgatctcgcgctcgacatggacactctggctgaccatcatcgtgccgatctcaggtggagtcaagaagccccacaggtacaggcccggaaccgtcgccctccgagagatcaggaagtaccagaagtctaccgagctcttgattaggaagctccccttccagcgtctcgttcgaggtatgtagtcatcaaacaacctccaaaaactacgttgacagctgacacggctacccctttcccgcctgtagaaatcgctcaagatttcaagaccgacttgaggttccagtcctcggccgtcatggctctccaggaggcctccgaggcctacctcgtctcgctcttcgaggacaccaacttgtgcgccatccacgctaagcgtgtcaccatccagcccaaggacatgcagctcgcccgtcgtctccgtggagagcgtgcctaagcgtaggctcggacaaggcgtcccagcctcacggactacgattacctcactccgttcgaatcgccgcgctaccctcctggccagttggatgtcggtgatcctcgcgagaatgaggattggagtttggttcccatgtttctttacacagcaccaccggtcggcttgtcgacctggtattaatttcgcgttttcgctcaaccacttgtaacgctcagtcaatgatgcgtgttttctcagatctatcgtgtcatcatcatcatcagcatcgtcctgattcagctgccctttatcctgatccacctttcatctacctcgcccagtcgagattttacacgtgaccgttcgtgtcattattctcgcttgggactcaacggggcgaaaacagtgcatctgatcaaagagagtgtttcatgaggtgtcatttattataagatcgtgttagagcggtacaagaatcaagctacgttgacactctgcatggtaaacggactggcgacaggtccatcgaggatgttgagctcgtcttcggtgaagagatgcagcctgggtacgatgacgattctgaaggggatgaggagcgctatgacgatcgggaaacctggatatacaggaagtaagattgatgcgacatgtcaataagagcgattcaatgactgtgcacggctatcactcaccgatcgccgcgatggtgttggttattgcgaaggtggcagcaaaaccgagcagctgaaagctgagccagatcatgatccgagacttgcggacgcggttaagcggatccgagggcgaagtcaagcgtcggtccttgatcaggaacaagaacagggctgtcactccagacccgaacaacgcggatgaacccatgtaccagaaaagacccgcaagaactccttttggaatgagtccgagcagatgctcgaaggggccggtcatcaagaccaagcctgcaacccgtcaagccgaatcagcagtttcgacttatgctggtctcagagcaaaacatgccgacctacagaaagcgccctgtaccagattcgagacacgctgctccaccacagcgatcggtacttgcttttcgttgatttggttctcgagcttttctatttccctcttcacctcggaaaccctgcgtttgagatgtccagaccgtccgacaggatagctctcgcgtctgcctggaatcgagtcttcttgggcatcagacatggtgctctcctcgtcctctcgttcgtgcttggaacccatgataaccagcgaggcagtgtgcattggagcctgtgggatgagacctagagcgcttacgtcttgcaatcagtcaagacgataagcctgagctgcgactgcggatactcaccgttgggcgcaggaacgccaaagatcccggcaagtaacgtggtgattccgagcaggaagaagtcccagtggaaacctgccggttttcgtagagggaattcagatccctgagcgataagtgactgtaaaaaattgactttgatcagcattccgcagggagacatatgtcgcgctgtgttgcctaccgaaacattcgcgctggaagaggtccaagatacagctaccgctcagtatatacccaacagaccgttcagcttttggagaagtcacatactcgaagatgaacagaatccaaaggaccaagccgaaaggaaaagcgattccgacgtatttgcctggtaattgccagaacctcacgacccagtctcttcctgcagccggtttgtaagctccagttgttggcaaggtcatgccctcttctgtgacataaccgtgaaaagttccccagtacgccaatccagaacaggcaatgaccgtgatgggcatgccgtaatcagcgcagaaccgcctgatttgtcgatgcagaaaaggcgagtgatagatgagatcaaagagatggggtatcactagcgtcaacaccgcgaggctggagtaactgatcagctttgagaacagggattgagatggttcagcctgtacacttacagtacgccaaggaacgctgacgcatcgtctgactgtccaaattgtctcgtcaccacttggatcccatactgccgaagcagcgtctcagcgatcgatgtagtaggaatgcatagcggagacattcacctgaaggtagaccatggcaacataccagccgaaggtgtcgcaaggaaaccgtgtgacgtatttcaacaagcttacgactgtgccaagtcatgatcagttccagcgagccgatgaatcagctagtgctacatgcgtgtccctaaagcgacatcctcaccattgaacagtgcagtcacccagtgcaggattgcgccccagagataaacccaaccaaggaagtgaagatagttgaaatcaggccctcctgatccgttcttgacaaagatatcgtatattgtcttgttgaatacggtaataggcccggttactcctgagatcaacaaaggctgcgcacccaagaatgcggcagcgccggccgcaatgaactagagcagtttcgtcgcaaggcacggtgtcattgatcaggttgaattgcatttgactgatagcaattccaaagctcacagtagctagcaagacttcttgcacacccgtttggcctgtaacctcaataaggtccaatgcgaaagcgatacctggtaacacctggagacgagccttgtcaacatggatgggatgtaacatcctcgcatattcctcacgttggcaaagaaaatcatctacagtacatgctacacatatcagatcgacctcgaagcagaatgtagagtagattgctcaccagggttgccggtactaccctgtaattccaagcatctgtccaatcacttttgtagtacggcaacctattccgtatatcgcggtacatccctcgacctatgagcatataccattttgagggcgtccggggaccctcctcctcctccgactgaggggtctccaagcggtgctggacgcttgaaccagtccgacgtctggtcattgggatggccagatcttgctggcccatattgttggtcacagatccgatggcagtccgttcgtctgaatgcctggccactcagtactgtcgatatgtgatttttgcaggccactctcagcaagatactttgtatgcgcggccgtccactatcgagcctgtgccacccgtggcgagacctataggctcgtaccactggatctaggtcgacagcggccgactggacgagttgttcacacttttggttgtgcgatcggaaatcggaaattccccgggatcgcgtcgatcgagatttcaagagtgacgaatggaggcgaagtgatggaccaggtggatatgtataggcaaatatatagattcgtccgggatatgtattaagcgaattgtaacaggtatacaaatagaacgtctgtcgccgaaacgtagtcgtagagatatcgagcgcatttcttgagcatgtctatctatattcgtgatcccaaacttcaaaaaactagacctccttgtacgggtagtcgaacttcgtgtcgttcttcctccacaacttgcgcctttggaaacggacaggatacgatgagaacccagccagctgctgctatcactcgggggaaacgtactttttcttctgaacaacatgctccacaaaagcctctgtacagtgcttggctttgaacttcttgataaagctcgggtccctggagtgcgttgcgataagtgccagaccatgacgagagcgatgaaagcaataacttaccataattcgctagcgattcctagatctttgcagcatcgcatcagagcgttggatttacatgcctccgtcgcagtgggtactccagaaggatcgaagtattcttgttcacctcttgcaatggcaaccaatctaagacagagtcatcggtcgtcatcagcaaggattcaaggagcaagtcacagatcgagattgtgccacttaccggccgagacacacgagaccccactccctactgacgatcctcggacctacggtcgtctctccgcgaggagccattccccaacctccgggtccaaacgcttcattcagtgtgcgacgatacttgatctcgggaagatatatcagtccatctacaaagagtgatgcaaagcaggttagcgcatagattgcatagctggtctggtcaagactcaccaggtttgatctcgatatcggtaggagcgagaggtcgcaaaagtacgtccgcaacatctttcgcaaacggtttagcgctcaacccatagaaactggttgtccagtcctcgccgatctctcctcgccgaccagcttcagctggatgttccgacaaggccgtgtgatgggacgtagcctctgcggcggtacgagcatggcctactgcaccgccaatgggaggagccaaacgggcatagtcgggcaactcggccaccggctgaggatcaggaaaagatgcttcttccatgtcgaaatcatcgatatcggggacggacggcctagaggtcgcagcaggcgtccgttcaacaggattcgaggcagcaggagccggtgtcttggccggcgctttccggaatgtcgacgtagctccagcaggctttgcgacccgagcgtagacagtccgcctctggggcgtctttacgaaatctgaagagggtctcgacaccgaggcggtaggattggaagtgctagttgcggccgccgctgggagaaaggtgggggagattcgagctgcaggcgaggtcgagaacttgcgggcgatcgagctgatggtggcgaacgatttgctcatgatgaaggcaaccgaattaattgagatctgatgagcgtcgagttcttgagagtgtgcgtgctgtctccagttatatagtcggagatgagaggaggggaggggcacggattgataccaggtgtcgagtcaggagaaggcggggacaaaagagtggttcgatgaggtgagtggggagggtcgatgagagtattccgtgccagtagttggggtggtttgatgacgagaaacgagccagacttgccacttgaagtgcgatgagcagacgtagtgtgatcgtgtgatgagcgatctgaagcgatctgatcaaggatcaaggttgaggtcgccgccaaagtggaaattgaatccgacaaggatcaaggttgaggtcgccgccaaagtggaaattgaatccgaaactaacaggaagaaggcagcaggcgattgtcggaatcaaattcacaggatgacgagagcagatccggggccaggcgacgcggatcggcttcgagcgaacggttcgaatcgaccggtggacgttgcctagttagagtgggtctccatgcatgatcagagagtgaacaggtagctaggtcttcctgatgcagcacggtaaacatcactcgatcactcgtacaacgacagctccagccatccgtacatcgcgtcacattacgatctgtccgtggtgaccttagttgacaacaatatgggcggtatgtagaatctcgcttcaacgggctccctttcctacatctgaccgcgtacagcaaccggatgcgtcaagtacagtcaccttctcgcaagtctggtcccggcttttcagctcgaaggaagtcaagttgctcatactcggtcttgatgctgcaggaaaggtgcgatcggtagttctttcgcgtcaaacaaccgagggtgaatgtctaatcgctgcgtctcgtttcgtctctcccaacccacagacgaccattctctacaagattacaaccggcgaggtggttccagctgcaccgaccgtgagcaccgcgatttttgcgatatccgtcctcgtagactgacaataccttgccttgtatgacaggtaggcagcaatcacgaagtacgttcctctcacatattcatggccgtcatagcggtctttttatgctacgaggctaacacgacggacagtaggtgtatacctataagaacatgaaactcggcctcatagatatgtgagcaaatctcgacaacggagtctggacgtatctaacggcaggttcgcatgcctgctacagtgccggacaatccagccatcgccaatcgtggtcgcagtatttccaagccacctccggagtcattttggtcatcgattcaacggacaaggctaggatggatctggtgcggcaggaactacataagatgatggccgacgaagtgagtcatatctcgttgtgaattggctcagctttgtatgcatgcctcgaccgtcgcttattccgactctcttatgtagaacctgaagaccgcgctacttttggtgtatgctaataaacaggatctgcccaacgccatgacgccgtcggaagtatcgacgggccttaatttaacgagtctcaaagagcgtgagttcacgatgtctgtctgtgggactcgccgaccgttgatttgacgcttggacggttctaggtgactggcagatattcggagcatccgccctcacaggtagtggacttttcgaaggggtgagtttggccctattttcatcgcttgaccaaatagtttttctgaattcgacatcgccttttgcaatcgattgcgttagctcgactggctcgtctctaaactcgccgcgtgagccgatcaagatcggtgcggggccgtcttgagactgcagtgtagaatcagaatcaagcatatgacatttattttgtattatgatagtgggcggcctgcgctcattttagcgaacaagagcgaacgtaaagtaggggatgcgttacaaatccatcaaagcctcacttgtactgtacagaacccgatcccgagaccacggtaacaatccgctccggaccgaaatttcttactccagtacttcccagtcaggttggacatcctcctcgtcgacccaaacctcctcccattcgccttcgccatcttcctcacagaaagggatgtcggcatcgttggttgggagtgcaaatgctgccgattccgtgctcgacgggagcgcttcgctcgattccgttatggcggtaggagtgacggtagcttcccaggccgaagtaccgctcgtttggctctcactggaatgaccttcagtctcagcgcttgtgatcgaggtctcgagcgcgcttgacccagcgattcccgaggggtttgccgtttcaatgaccggccaacccgcggaagtggacgtggctgtcgtcgcggtcaaagtgctagcgacttcggtttgatcccaagtgctggccggagcgctggttgtcaccgccgttccttgaatgatcgaggccgtagccgtctccttcagcgactcggtttcactagcgaacccagctgtgctggtctcggtgacgtcgagtgtcgtccacgctgtgaaggtctcggtagcgataccattcccatcgtcgaacaagctactggtgaggatatcgctgtctgtggtcgagctagtcccgctcgaagactccgcctccgaggtcgcagaagcaatcagtgcgcttgtaacggaaggcgtcacctcggaagcttccactgtcgaggaactcgtctcgcttggaccaagtgaaggcgtgtccgttacgaccatcgtagacgatgcggacccttcggtcgattgagatgcatgagactccagagtctcggtggcggaagtctcgacagacatgatcgccgacgtcgatccggtgacagggtcggagtagctctcggacgaactgtgagcaaccgaatccgcagttaccactgcgctataggttccgctgaaagtcgaggtggcgagagggggaagggcggaaccgttcatagctgtctcggtcaccgaggggttcgatgcgcctactacttggctctgcgtttcagtaggctcgggttgatcaatggactcgccggccgcagatgctactggcccggctgaagcgagcggttcattggtagaaacagcagtgataattgggtccgggtagagactggaaagcgtcgatgaagggttccttgtttcgcttgcactggcggtccaatcagcctcatcttgacctggctctgattctgtggctgtcgcttgcgcagattgaatcgcagtgggctccggaccaaatgatgtagccgcagaaagagcagggtatgtcgctagaggatctgtcgccgtcacctgttgggtgtacgcctggggccattcggaggcaactgaggtaggatctggcgatggggattctgtggcaggggcattggcatcagattcgaagactgattgcaaatcggcagccgtttcgatgtccgatggctgagagggctccggggtagtctgagtggcggaaacgagccaaggattgttgacggtctgctccagagccgaagaatgttcaccttgcgcggaagtcatgggaatcaaggtagcgacgacgacgcccttcgcgtcagtggtagccgacgctgtaccatgcgtcatcgcaattgcgctaggtgcctcagtgttccaaggatacgcatgttgctgcccatggcccgaaatccaggcttcagtcgttgtagggacggcggcttgttggtcgcttgcactcatccacggatatgcgtgctgctgacctctgccagaagtccaggcgctgggctctggggtaacggccggagtagcggcgggttgttgactggcagtcatccaagggtacgcatgttgttgtcctttaccagaagtccaagcaacaggttcgctagcgctaggagctggttcgacagccgtagtcgaatatgcgaaagttacagcgccccgaccctcagacgagattgctgaaacatatccctgtccgacgtagtaggatgtcgcagaaggggaagggggggtccatggcgtagggtaagcagcaactccagtcgcctcggaaccatcttcggaccagttcacaggcgcactgctctcagtcgcgaccggcgctggctgaacagcaggcgtatgaatatagggagatgcgccagtgggttctacttgcaacgacggttggatcactgaaatgggagttccgggagattgcactggacttgcgctgaaggtcggcactgcagttgcggttccgtcattgccgatgtggaccacatagtcccaagtaccatcaggttcctgttcaataaaacatgcccctcaggttccatttcttccgagactagatggccgaacttacctgggtcggaaccatgactagctcgacggtgacagtcggcatgtattggccgatcgcttgctgcatggcataactttgagctgcctgtagagcctgatcaacaggatccgctggctgctcccatgcaggcgtcggtgcatcggtaacgctggtggcgggagtgtctgatgtagctgtaggtacatacgccgagtatgagaaggtagaatatgcggtggccgaagcagcaagagatgagatcaagttggagacgactggatcggtgtcgttcagctggggaggaacagtattgtagccggtcgagttgttgatcgtggtagtctcgttggaagcgagaggtgttaggaaaccatcttctgcatcttgcccattaggagcggtagtgttgaggatcgtcgagttgctcagatcgataacatcggccgcggtcgtcataacggtattctggctattctccgttgaaatctggggagaacggacgaggatgaacctgttatgcgctgccgagcgtcgccctcgaggtagagcagctgcctcgactggtagggacagggccaggcccagcgtggaaattatcgctgcgaagagcatagtcgtaggggaagccggacgtaaagcggtttgtgatgtggtaaagcgaatggttatctgggctccaggcctttgtcccgcaagcatgcagggagaacatgatcagcctcactctggctcaacagtgccggacgaaacataccgactgcaaaacactgcacggaagagaaggctcgaatgtgcacgaactgatgatgaacgaaggcgaagagtcgtctgtgtcagagctcagctcttgacgtgatacagcgatccagacgtgaatgcttgtgaaattacagaaagggcaggcgggatgtaaagaggtgactggaaagcaggactggatattgtataacacagttgagatcgatcatgatgatgagaacgttccaagaggcaagaggacagacgtggtggtgggtggtggcgacgacgatgcaggacgctcgatgacggcctggctggtccgaatcttggccaaggtgggaatttcgagatgagatggcgggcaggatgatggttgaatcaacatctagccccgaactcgcgacgatgtaatcaccaaaataataatgctcccgcgtgtgcctgggcgacgatcgcggcctcgtccgtttccggaaacctggcttgtcctcgattgatgtgtgcatcaagccatcccggaaaagtgaccgtccgttaacaaacagctgaggctacggctagcaaagaaacggaaatctctgtctcacgtcaggcccggatcaagcaccttatcagcatcagtcatgatcaagttctgattgttggcgaacgaaagcatcaaccccttgaagggtggagtgaggcagtctaaaggaaggattcaatctcatattcgggacctgatgatatacttgtcgagggcgattcagacatgttgatgtatacaaggctcagccgcctctacttgtcatcatggtgtaatttgtctttcagctgtggcacaagtcagtggggatgtcagcgttcaatcgttgcattttatgcgcaagatgaccgaccttggagaaaaatcccttcttcttgctcgaagtcgagactgcactagcggttctatgatgctgactggcatcgtcacgactacctgtatccgaggtgacgttgctgaccttgagggtgttcgaagcggtggtagaaggttgtttcacggcaggcttgtctaggacagggtcagcgcgatcgatcgtgacatcccgcgcaatcgccaagtcctctgtcggacgaggaggcggaggtagcgctatatgataaaatcaagtctccgatcagcccattcctcgtacgtccgcaggatatgcacaaatggttcacgaacccttctcggataccgtgtcgagcgcaggataagggccctccactcctttgtgatggttttcgccaagatgaccatgtttgatagctgttacggaggcgctcgaatccatgcgagcggcgctggggtgatcaagcttgccaataggatctgattcgtagatactagtatcccgcgaagtggggaatgaagcaatgtcccgattctgttccgcacccggaacactcggctggagctcaggttcgatttcgggcgcttgggtcgtctcgtagcttgcagtgtagccggcgatgggcggattgactgcaaaattttcagcaagcctgtcgggtgctccgactgcaggcttcgaagcgatctcagcgtcggcagcggggcgcctcagcaccggttctacagtctcgacctccgcgacagccatgacctccacaggggcttcagtcttggctggtagaacatgaccaggcaggacaactctcccactacccgcgatcggcgtagtgtcagtgaagactcccaagggaggcgccaatgcaaacccgcctacaggaggcgcagaataatggtctacaccagaagccgacgtatcgctggcaatgccttcagaggtagaagtctgggctgaaataggttctttcgctgtctcccgaggctcaaggttagtgccctgcatcggtctcgctggatgggtcgagatgtccgcaattccggagcaccgtcagtcagattcatttccgtggtctattccgatggcacagcttaccttgcggggaagaattgtgagaatgggccaggtcgattcggggcctttcctcctgctcggatcgagctctggaaccgacatctgaatcagattcaggaacgttgccggggactgtgcaatacaagtagcgttagcaccgcggtaacagaactccgggcggtatgttcataccgattgactgcgtaacttgaccctcggccgaaagattaacattctctgtatcactggctccctggattgactgcccatcacccgagatgctcaaaacgccatttgtcgccgatttctcaagtccaggctctttgggtgcgacagcgttctcggcggaattacgttccaggctcttttcagctggcaagacagctacgcccgtctcgttgttgctacctgggagagcaccagcgccatcggtatgctcaccagaccgttgcccttgcgtctcctgagatggcagagacgtagcgtgggagacgacgttaacgggcttgggtgaatctttgtctcgagccgaaccagtcgcccgatctgcgtactgctgggcagcattgtaagcttcctcggcgcgggatcgggtgccggacaataaatccgctgccatgcccctggcctggttgaggagatcggtcggactagcttgaaccacactgcgagtagggctaggttcttcgcgtctcagccctgagatatcgcccgaaatggctagaaggtatccgcagaatgagcttcttctttcgctatgtcaaccttatgattaaggccaaactgaccttgactacggctctcagctgcagagtgacctcggaaatcgggcaactgagggagatgcacattgggcatctgaggtaaatggacctggccaagcacggacctagcctgatccagaatggacggtccggaatctgcacaatatcactcagtatgcgtttgattccattcgctcattaagagactcacgagggcggttagggttgattgaatccttgaggctttggggaatagcgttgaaagcagtatgaccgacactgtccagtccggtcacgacatcctggtagactgtcgtctccggatgctcgcggtcagctccgggaacggaagttttgagagaccctatgaaagcaaaatatctggtttcagtacagaaactcccgtaagtgtacaagctcgatgaagggactgaccgatccagccgccgggaagcccttctaccatcggcgtgtcgacaggcgcgtttcgcgaaggcatcaaatcaggtaatttcggttgcgggatctgttgcgtttgaacgggaacgtctggcacaggaacagatactttggacacgactggctgggcgtatttgtgtctagtcgacgagaatgtggccacatcgtgcattgaagatccagaatcctgtttaggcagagccgcctgttgatctaccaggcgtgcgatcgtcgggccacttgaacgatcctcgaaagccgatgtcaagcccatcttcgtgtcattcggctcgggttctacgccgacggtgcgggtcagacccaacgaagtggcaggcagaggtgaggcagtagcagtaaaggcattgccggtgacttggctggatgcattgacaggaccagaagaggccttggcttgtgtgatctccgaattcgtctggatgaattgggtagaagccaagttagcagccgctagctgtgcagcagcctgttcccttccagacagtcccttgagaagttcttctctggtggatccttcgctgtgcctcgcaagtttggcttgagcggcgatcaactgtacattgtctcccgaggcaaggccaccggtaagtccagattgatcgtgctgcagattatccccaagtccagaggtaattgatcctttagctcgtggagcagcatctacaaaaccgccagtcgacgcagttgcgcctgcgtgatcgagcgcaccatcaacggccttgagtaccttggagctccattcttccgcctatgcagggtctgttaatgatattactggttgtagatataggagccctactaactggggttgacccggccggaggaagaccgaaactcatgctaggcttgcttctgttgatcgagatgtgacacgtcgaaaagtctacgctggcaagtgacacgcttgtaaacccaagctttgaatacgataatcgcttgcaggtagaggtgaatttgacgagcaagtagagttatcagttgatcgaacgattcactcgaagtagttgctctgacgtccctggagctgatgatgatgtcttatgagcttatgaggatgcaggatgacaatgatgatgatgatgatgacgctaggtgaccggcgaggggccgaatgaaggtgacgtcatagatccggccgaacaagagcatgtgacgaagcttcagcgcagtatgaggcggaaaccgtgatgtcgctcgagagggctttgaagcggataaaggaatgaggaatccaaaggcaactgggagctgaagagaaaagataaatcgcactggcattattgagcgagccaatcaattgcttcatgtccgaaacaaccgaatacccttcggccctgcactggaaaaaccacttgtcacctgctgcagagacaggtaatgggtggatcggtcgaccttccatctcatctgctattcaacccggattgagctgtacaacttgtgcaccacgaaatacgacgttaagaaccccacactccctaacatcaagaaattgattgtcgcaaagaggaagctgttgtcggaaaaaaaatcattgagaacatgcgtcccgactgaacctgaaacgacttacagatagccaaaatataggacaacgctgctgaaaccgtcgaaagaaagtctcgatatccagtacctagaagaaaaccgaccagggtcattgtcgtgatccagacggtgcctaagcggaacggaggcaatatgaccaaccaggttccataggcggacaaccacaagctggatgcgcctcctatcaagaatgctcgccagtgccacctgcgatggcccggattgaaataagatcaattcggaagcactgaggaagactttacccacctgtattcttctgcacagagcacgaaatctgggagaatgagccttgttaggatccgatcctcttgtcaaatcctcgcctagcatacgaaacttacagacaagtagcactgttatggcagcagccgtgacattgacgacagcaaatgtcaaaaagaggaacccgaatgcgtaacttcgaaacgagagggatttagcgttgtgtaaagctgcgcgagtcccggactcactaagcgcggtgcccgaagagcgaagtgagcataaagtagagctcaacaaaggccgcgccgaaaggcagagcgccgcccaatgctacggacggctgtttcggattgggcaacgtattagccagtaaatttactgatagaacttttgtccaaggactcgcccattgcctcaagtactgtcagacgcttctgtcagctaggcatacggaaggcatggtcgcggttgctatacttactactggcgccggtggcacttgccggggaatggaattggtcctaacaggaggtggtattggctaaggtcgaaatcttcattaatccgtcatttatggagacgggaccttgccgacgaaaacccaccccatgccgcatgccgtacagataccccgcaacacaaaggggtccagaaatcaagaaatagagagccaagatagccatcatcgtaccgaaaggaacggctccagatgctccggaaccaatgagaaacagattgagcgtgaaagtgacggcgaagacaaatctgcggcaggaaatgtttggtctgaattctaccggctcggcaccgctggaagattacgccaagactcacgtggggaagccggtggcagttaacgtcagattggacttccaatcttcgcccctcatgctaccaaagacccgagccgagacatagccggaaacgatgctgaagagggtccagccgatcaagagggttgtcgctaggcctcctcgattggcaggagacaagaatccgaacaaggcaaagactgggaggagacaattgatgggcacgtcacgcgtgactgcatgagccgctgtgtcttcacgtccgtcagatttagctctcacccagagtgacggcggcgatgcacaccagttgtaccccactacccgtgaaggctgacaacaacatgatccgctgaggtgaacgaaagacttctccgtgcaccaactgcaacaagctcattaaccacgagattcgctttcgagcttgtctaatttttacttaccttccatccgacgtcctcttgtacctgcagagtcattcgagggctgttaatcagtagcagcaaagtccgctgattcgactccactgtctcacgtcttccgacaaatcgatagcattatacctcgcgatgtccttggatacgtttcgggcaagaacgctcccgaccactatcgtggcaacacgcgtccgaaagatacgggtcagaagagtatacagggtgcgactcgagccatgcgtactaaggatgaggaaaacaacgacgacaagtccattgatcaaccagaaccagtgtatttttgggtcaaatacatgtctgaaatagaagagaaatttagaacagcaaagttgtgtgccaaacgagatcaacccggagctcacaggtacatgtcccatctcagagcccacggtatgtcagaatctacccagctgacgctataactgaaccacagctggctatcgactgcttcagagagatgtactggtgtctggctgaaacagtctggcttgtctgtgccaggcgagtgttgcactgaacgagggtagactagaactcccactatacgaaaggaaccccgggtagactgatgcttgtggatgtaaatgtctgcgtgagggaagattgcataagcattactgggcgacgggatgacggagaggaatgcgtgtataccataatgattgttaaaggttgggcgttcagtggactcgacagacgttcctctgctcgtcaagtgtcaatatctcataagtaggggcctactgatcaggttcactcacagagcgaaaccgccaatgtcgtagaagacttcgccagtctgcaaatcgcgtttcatttctgcagcgggtagcccatcgatcatccaattatatccgtagtcgtcttttattagctggaatattcgtagccacgtcaggtctaagcatcggctgcacaggtgcgccgccgaagttgacccaccgagttgataaaacgggcgtcctcggcaggaacgacggctttacagagaggtttgcaagtggtgctgaatggccgttgtacagagttaagaggacgaaatctatactttgcgttgtggattgattttactgacttctcaagcatattgatctcaaaggggctgttaaagatcctatctccccagagaatggagccgagtgattctggctgcttctgtggtccggcctcgggttggcaaaagtgaaatcgagctaaggaaaaattcgcgtcagaatacttattcgggggtcctcatgaacgcgatcttacggtcgtaataatcatctacaatcatgaattggtgttaacaagatcgtttcatctggtatcaccaaacgtacggctaatgagcgatttctacataccgtgtcagcacgaagactaatctgatgccccaacgatcgtgtcacgctggcttactatattagatttgagcataggcgacagcgaattaacctgcacatcaatgccatcgcccgattggtagtcctgcggtgcggtctacaaagccgacatgatgactacttcatcagtagcattagactacgtctgactgcaaatagacactcactcctggcagataaaacgctcgcgcaaatggcacgagcaacagagctgcgaataagcacggcagtctaggttgtgcaagcattatagactgtcctccctgcgtcgcgcaagatacactcgttctgctgcgtggtcggtatttgaggatgttgctgtaggtcgagacctatttccagggagttgaggtatcaggaagggctatcggattgcaccgagaaacgagacaagaaggactcgtgatcaagctcttatctataagactgtgctccaagatgatgggccggggccgccgatatatgcaggtattctaggttgggagatcaagctagatgaaagttgctgctggatgcagctggatgataatcaatttgtcgaagctcgaagctgggtgcacgattcgaagtaggtgtactaaaatgcggatatccttattataatattgtagttacagcgggttcgtgtctttcggttgggctttcttgatcttaccgcgcaagtcagccggccgcggaccgaagccgtatcgtctgaacggaatcctcaaaacacaccttgccaggtagtattgtgcggcggcacggttgcgattcagcctttcatgcatcctctcctcgctggagtcacttgattcgcacttaatatatatcgcttacttggggaaagaacggacctcaccggtgctttacaagctgggcaaactcgtcctgatttcgctcgaatggcaagcacaaccatcatctccgcccctggcaaagtcttgattactggaggatatttagtcctggatccagcatacgatggcacagtccttgctacgtcagcccggttcttcactgtcatcagatcatcagactcagtccaagagaatggcatatgcgtccgctcgcctcagtttctggaagcggaatggagttacagcctgcacaatgagacaaatggagatctcgtgttaacgccttcagtctcgaacacaagcagcaacaagttcgttgagatagccttgagagagacgctgaagatagcacatgagatatcgccgaagagccgtaatccgtataccggtttgcagatcgatattctcggagacaatgacttctattcgcaacgaagagtggtaagtctggtttcgacccataattcggttactgtctggttgatctgctggataattagcttgaaagcctatctctaccacctaatcgtgaatccctggaccgtctgccccggttcaatcatctggaaaccgtgataggggacgtgcataagactggactgggctcgtctgcagcattaatcacgtcattggtcacggcgttgatagtacacttgtctatcgtcccggcctcatcgctcgcaaactacagccggccgcgtagtactgtcgacagcgatactcagcaagatctcgaatttatccacaacacttcgcaatatatccactgtcttgcccaaggcaaagttgggtctggctttgatatctcgtccgctgtatatgggtcacaagtctacaggcgtttcaatgactccgtactccgaccgctcatggatgataacacagtctctacgccgaacgacgtatgtaggagctttgtgaacgtattctaaaagatactgacgggccgcggcggtctggacgctagctgttgaaaaccttgcgcaatcacacggagtggacatgccagacgcggccggttgccctcccaccgatggtgcgactgttattagctgacgtggatgcaggcagtgacacgccaagtctggtcgggaaagtcttaaaatggaggcagtctttcccagatcagggtcagtcacaatcgtcactgacgcgtctccgagcgtagccacgaaaccgctgatccgagggctcctacccctacacagctcatgaagtttgggagcgactgcaaagcaacaacaatggtgtggtcagattgcttgaaaagttgaccggcttagctcagtcggacccagacggctacatcgctagtctgcgccatttcgccgaggcctcgcaaaaaccagcggggaatcttgaatgtttcgaggtgatacgagaccttaaagacatcatgacggtcagtcgatgcgctgagaatgaattgatgaggcttgggctgaaccgccaggcggatcacatcaggctgtgcgacaaggaatgaaagctatgggtcagtctgctggtgtgcccatagagccagatgagcagagtgagctgcttgatgcttgctgtgcgatccctggagtaatcggaggcggtgtaccgggaggtaagagcggcttcgttgagggagactggggtcctcattggctgattatttttattgatagcgggtggatatgacgcgatctacgtgcttgttgtagatccaaagacagatcttacttcagccgaagatgctgccgccgtcaagaagattctctcgctttggtcggattgggagtcccttgccgtctcgcctcttcagagtcgagccgaagagggggggctgcgatactacggcgcgctatcacgggttgaagggcttgagggcgctctttcgacatgtagaagggtataattcgaaatgtagttatcgatgaacatgactacaagcttgctgacaggggtttgtttagaaaacacataattgagccggtcggcgttgttcaccttcgactgcaagatctaagcgccaagccgcagaattgtgccactaagagatacaagaggagctatgaagcgtaacaacgcaaagaccccaaaggtagagatcagcgatgcggcccaaggatacgcttttttaatgaactgaagactcacaacgcaaaccacaatggacaaagccatgattcttgtattcttccaccacatttggcgcctcacacctgataggacgagggacatggagtataacgagacctgtcaatcgattgccaaaatctcgggcaggtggacatcgcaaatgactgacctcgagcccctctcctgaaggcgtgggcctgatgtgccatagtatccgtcttatcgacgagcacttcaatcctttctcctcgcgcaaggatactgtcgatgttctgcaccataatatccttactagacagatcaggcaggaagtcattcaagaagtcattgctgtcaaaagatagcgattgtttaatccattgactcgatatgcttacacattattcatatccgtttttgcttgtttgagagggtccctagcagtaccagatgagaacttttgcatcaggttctggaggtcggactcgagctccaattggagagcatggtggtgcggttgttcaagagctgtgctaagggaagggttgttgtgcacctattgcaacaatagtgagcctaaccattttcgaatgacgatcttacgtgacttaccctttcctcaagagcttgaaggaaagcgaagggtgtacggcggccaactgtgtcgtcggcaactactaaatataccaccccgtctgatgagacgtagtggatgagcttgtcttgccatacatctattcttgaaccacaaagtatcaaaacccattcgacggacactggcaatttcatagacggcttacatgtaagtttactgttgttgggagggatcttgctcaaaatggtgacttgggccgctgattgcagcccaaccaccagctaatcagacggcagtacgaggactggacataataagactgacatgttcggaaggtctccgcggtgatgctgtgctctgcgaggacgactgttccgacagcgatcaaggcagatattagactcatttctcagagcctttttgttgattatgacactactatgagatgtcaaagatacgagaagtgttaaaatcgggagcccacaactaatcatgaaatcaaacgctcatcggagctcgccttgatgacgttttggccggatctagctaggtcgcaccgaccgcacccaaccgcgcgaggaatcaagcggtatacgcgggaaacgcgtgtgactcgcgactcgaggcgtagggggggaaccatcatcaattatcaattgaagttgaatatcggcttgcccaagaagtcagtgaccgcatttatcgacatgcacactgcatttgataggagttgagtctcgtgaggctgagaaagatgactgcagtgatgtaatgagaaggcagcagacccgttgagttgaggtcgggggcgcatagaaataattacaagataatcttgagcatggcaatgtttaggagtgagagtctcgcacacatgggtgtgggtaaaaagctgtggcagaggtacagtctggtgataaatcctcgttccgaatggtggttcaggcgatcgattccgaagaacaagctgtgggaagtagcgcctgtcatagctgtctcacacctccttaacaccccgcttgccctctccaaaaacatggaatgatgctaagcctgagctaaaaaagggtatcaagtgctgggacaatatcagaaatcataagggactcgtgaaaatgcaaacaagttgtttctgaagtctggcccataggctggctggccaacattactggcgacagaaagtgtcaacaggtcaagcaagagatcggtgatatgttactggagcaatctgcagatgtggaacaccaaaaatgtggattgtacaacagctgaacacatcactatgcaggacaattcggttgactcaaaccaaactccaagtataagttgcccaggaccatcagttgagagaacccacaaacaagaatagaacaatgtctactggccagaccattggcagacaatagataacaaataaatggtcccaagggtacttggttgcaaccaagctagttgttgcgggaagcgacgcacatccggctggtacgcttcttcggcctgcgcgttcttgtcaccttctctcgtcacccgttctctgctatcgtcatcactactattgacacaacgcatattcaatatcactacccgcggaggtcaatagcgatatcgacggatattcaacaaagaccttatagcttgacgacctactacatcaaacaaagacatctgactcatcaaaacgatgattcctcagtgattaggtgcctgactctcgactcccacttcggctctttgtcccggatttgccttacccgcctatcgttctcaactcgcaataccactctcgtttttgtatatatacttagtagaacttgaccgaatccggcacaggacgctcttgtactaggaaggtcaagttccaatatcacattctatttacgcctactgattgcaacaacactgcacttcaagacgtattgtgaagaggttacaattcagggaactcgctaagtagtagacgtctcatcgttcatactgcactacgcgctcgatcctagttacctatagggacagcacttccttatccgtacataaacctggacccatactaccccaatcgaattcgttctacctaaacgtattcggccccgctcctgttgaagactacctacaatctgtaccgatatcgcttagatattcaaagacgcgacttagcaaggacccgccgcaacactagtccctgacataacaaccaaacccatgtgatccccagtgattagctaatctatcatcaatactactacaagctataactcacctgtgatccctagtaattagctagggaacacgaacacagatgtaaagtaatctatcgaagtatagatgatagatggtgaatctctagagggtataggagaagaggcgagaggcgagacgcgtctagagtcacgtgacaacccaggcgctgtagccagatctcagggacaatgctgaatccagaagcgccatgtcaatctgtttccaccagccaaacttgtttgtctacttccatcaactcccacttttgttctcagatataaacaaatgcttaagaacttgaataaacgcatcaaacgatgttttgtgttatgagaggttgagtacatacatttcaaatcaagatgtactgtgaggaggttacagctcaagacgatgttgagtaaaagatgcttcgtctagacttaccttgtactcaaatttgctgttaccgctcaaagcatctatctttcacccagcattgtcctgtgtcaaaacctcttcatagtatgaatcatgcacagcaagaatctcgctagagcaggttgtgtgacgtgtcagtgcaagtgtcctaggggactcacttagtgacagtctgtcttttgatgttgggtgggtcttttgctggaaatttccaccttgacattgtccttgcaaaacacttccatgcaaaacctttcctggtcttgcacaacaggattgatagtgttattgctcagtccgtagacggcaggtcacccccagggacgcatcacatgatgcgccagaggtgatgtctgaggagatgccccaagtgaaagtatgtttgttgatgttctattgtactgcgattttacggatgccttgggcatctgttattgcttctatacgttagcccccacctttgccgctctcccgcttacttctcctgtggaaccctctgatgggaccttccatcctaacaaatagtatttgaattggttgtgacctagtcatgcttggactatctttgctctgcttttacgccatctatagtaccactcacttatgctcagtctatgttcaccatctacttgcttgatgacaccagcaggttacaggtttggtgcccaattatgttccaatatctctagatatatatgcacatctccagattgtactcctctgtactttccacaaaggttgatggcctctcaaacgactacgaccatatgttcttcaaaacctgctaacaagtcttagaccatgtcttcagcccttactggtaactgtaaaggatcagggagaaacttgtacttcctacatagtttcgtattccatactttgtatcttgtactttgtactttgtactttgtactttgtactttgtactttgtgctttgtacattgtacggctgcctcttatccttgtactcctagtctactcatgagtatatataggagaaaggatggaggggatcagggtacaatatatcctacctcttcacacttcactcatcttactagaaggttataagaccctaccttaggatcctccaccagaacagagtcacctccacttccgacaacctgcgccaaccccctcaaggcttagctacccttgttgcctattcccttggagtcatagagagcaagataactgattattacaggagaaggtgttgagacaattgcaagagacggatcaaacagttgtgagaaacctatctttcccttaaagaaagcttggtccgtcacagtaactctgaatcaatattattgttcaaatagcctacagggagacttacttagcaaacagataggttttccaattcagctcgttcctcttctcctctcctgtggtccacctggtgtgggagaaaccactatcacaaagaataatgagtaagcataaggttaggctgcctgcaacatttatgcctgtgatgttagcatctctcataatatgtcagcaactgcataggtgcacgccaaactgtcatcggaacgtttactacacatcatttgggttgacaaaggggcgcaacatctgcaattgatgtgacagagaaaatatgtgtcgcccaaatcaatgcatatcggttctctgaggtacatatcggtaccgtagcggagggaaaatagaatgaggaatggtcattgagcaagacacaaacaacaaacaaaatgtggggattcgagtacaatgaagttctattccgttctagacgtataacgggacgcaccaactgtattacatagcaatgcttgaggacttagagaactcaagcgttgatattacatctcttcaacaactattgttacaagagtttaggtcacaatcccaatggttgactacctctgagatctcatacgcgtcttacagagcctgatggtaccttttcccaatatttccgacgcgtttaaccctcctgtgacacaaacacgcacaaggcttacagtctataagaggcacaacgcttcgtatcgtttctaacatgtttgcgctttattatctatatactcttcacatcgactgtgcaccaagctgccccttaagatcttgactagctagtgatttgctttgccaagtcaatatgtaagttcgtaattacacagcccttgttccggcgtccatgctatctcctttttagtcgacatgaacgccatgcagtgtcagcaaatatgtagtaaggttgcccaaattggcaacgcgcaatgacggaccggaaatttatggttttcataagattcaatgattcctcaaacgttcacacggaactggcaggtcgcagtaagtacaggccttggacaagctatctgagctgcaccaggtggatgacgaggagcatagacaggcattcggaaggacgagatcatcacactcaggactagtggagggtatgcatgagactgtccggggaatcgttcaacacatgcttgctcgatgttcggacagctgacctcaagctgtcgtcaaacaattgaagtcacctacttgcttgatcagctgcctgtgacttttcatgggtgacttaaatcagagtcaggctcaacgaagagtcaagacgatcacttagtaatctggttccatcattaagaagcaaaggggaatatgaatacctatgttgccaactacaagcaagtgaggttacagattggcataatagccaggatagcatgccaaacacgaacagaagaggagtttgggttgagagagaacaaggactggaaccacatcaaggagatataatttgttagagatgcggaaagaagtccaatttagtgcagagagattcgagtctctaagatggagaattgagagaccttgtgttgtggggcatttacaagccggccctgttattatatacaatggccaaacttggcacacaggtcttgacaatgtgaggggaggggtgtgttcaagacatatgagaaggccatttagcaggatatgtgtgaaagggcgatgcgtatgatctgttctatatgtcattgtattgtgctgtgcagtacaactacttgctgattaatctgtgtctgtttgtaaactcttctaatatgtctctcgtgacacggtagcctgcatgtcagtgtgatgacttcaattggaccagctagaagcacatccgttccatgctctagctgatttgtatgcctctatatacattgtacaatactggcacaggatggtcaattgcatgtgtgaaatacagtgaaccttgctgtaaattactattaggtgctgtaaaacttgtgagatcttgaagctggctgacagtcgatgtaatgacctaatcttttgtaaacaatatttatgaaagacatggaatatcacgcttgacgcctccatgtcctcaagtgttgctatgtcctacaaacatatacttctagctagtatactagctagtatagaaaacaacctcgatgtactcagtaccccaaaaattggatattgtctttgacttgctaaacaagatctcttgcctttgctaaggtgctggagtatatatggaagaaacgatgtgcgcatcttagagcaattgagtcagccacattgaaggtcaatgttgtagcaaacgccaatatttcacaggtatctgatatatagtacgatattgtgattggtcgagcttggtgaacagagggaacaagtggaactttgaagagggaatcaaagtgtaggtgtcatgcactgagtagatgtgaaacacagggccagcaggagggggaatagccttgggaagttctttgtgtctgtatgcagaaggagacagatcactatgaggctatgcaagggtcactacttgaccttgcgtcttgcgtaactatcaaggatagtagccaaagcaagcagtgaagaaggtcttgttgaaaagggatggaagaaagagcaacaccaagaatgatggaatggtaggccaagatgacatgagcattcctatctgcaagacaggtttggattaatctcaatgttggtcatactgacacggagttggggcatcttaccggcccagtcatgcaactttacatccctaacaggccacaacagccaattgaccaacaatacgcttatgcatagagaacaccaaagaaatggaaagaggaagagacgatccactctgttgatcaaaataaggaaaactctcaagacttgtggaacatcctaggacacacatcttaaagcttgcagtatccgtacaactgtgaataacagacacagactctgttagcttcaagatggaggagtgttatagttacgggcgagtctcgcttatggtctgtctactgaatactgtgtttacgatggcacacagatcccggagtcaagcttttagggtatatgcgtgtcgacagtagacgcttgagaaaggctcagtaagaatgctaagttgtaagcgctgcgtctagtaatgttcaatgaatttgttgataactgtggtaacctctcctagcacatcctcaaatgaaaaggcgtgtgtcgaagctgatgactacgcttgaactctatagaagtcacgaaggtttgtgcagctcctaacaagtttgtgctacattgtatatatactccaacaacaacttgctgcatgcaagctcatccccaagaattggctggctagcaatgttgctacacagccgtgcctctccaacccaagctcaggcggtgtgctgcctccttgatgatagttgtccgtggtgcgtaccctctacagacccccaggctgacgtatcctcagtgtgtgtagcatgcaaagtctcggaccaagctcctggattggtattgccctgtgaaagtcatgtctgccttgtagcaaaaacaacaagacttgttctcagtgtggctcagtaactactggatgggatcatccagatattattggacccctcaagccagatattatcggacccctcaagccagatgaacgcggccacatatattattatgtaagttggtaggatctgcgtggataggagatctattgagaataagggcagtgaatgtttttggccgcctgatgtcaaggatgtttctcacatagtcaactttctgcaccactttttcacagattcgatctctgtgtgcctttgttgtagcgtgatacttgggtcccttgtacttttcttttaatttgagccagcacaacatgcataaactccaacttagctggttactgttaccgttcaggccaatgggtggtatccgcagatgcttaccccaatacctcacagtgaattgcaccttgggacactcaacaattgggtcatgtgatgaactccaaggaagcgtccttgaagaggtctttgtaccagatgttagggtggagggttccatcagaagatttcaccggagcagtaagcgggagggagaaggtaggggtcattgtataaaagtatgacggatgcctaaggcatccataacattgtagtacagtagaacattaacagacggactttcactcagggcatccccttgaaaacctcctccggcatgtcacgtgacgcgccccttggtgtgacccgctgcctacagcctgagcggtaacaccagacacacagaactctagagaggcatatgcatagtgtagatagctgtagtagagctagaagcagaaaagtatatcaagaagttacagagacgctcggaaatttggtcctacagagaattgaccggttcagtacacatggcatgatcaggaaaaatatggatatatcaaggacaattcaaactcttcaaaactagactccaagatctgcttgtgcttctatcgccagccgaaataccgccgtgttgacccgcgctagccttagtcacgatactgatgcacacagagtatttgacgatgttctattccgtcagcgaatccctcttgtgaagcaaaggaaggagctcacaacactgtagattcctgtggtatgccacaaacttcttgtttgtgtatctccagataccaagtgcttgttcagatcgctgctactttaaaggatttgaacaagatcagtgtcatgtcagttttggcccagttacgtcggctgttattggatagagggggacaggaaggccaggtccactatcgattacgcaaatccagccattcttctgcttcctttgtaaggagtaagggcaaaaccggaattggctttgttttggacagcatggccactttcaatcaaccattgccgatagtcgttgctatgtcactatgtctttgagcggagctggggtcttgagaactaaccttgtgatgcaactcaggaataggagctacctggagactccctacttgcggcccatgtcaaaagcgtgacatgaggactagggtgtcttttaattcagcaactcttgggtagaaccctgcgcctggcattatcgcagtgatggttgtgccagagaagtagagatggaatggtctgagcttcgtatctgaggatatctcagctccaggttcactaaggcttaaggcaatgctgccagatgggacgctaaaagtgaaggctctgtgccattcaacatgatagcaccctcctgagacaagcaagcgctataagcaagatcccgggagaaggtgatgcgggagtatgccctgcctggtcatgtgaagcttaattggattgaaaaagaacgcctgggaaaggaaaaagtgacacctaagacttatagcactaagtgaaattttgacgctcaccttaggccaaatactgaaggagttgagtatcttcatggattgacggctggggcaatggtcattgtacagctgcagaaacattgtggtaatggtgctgctttcatagttgacccctgtatgacctattgttcttgaggcatatttccactcttgcccctgaatttctccaatcagcatgtgggcttcaccgtcagatgctcaattcttgctttcatctatttatctgtaggtcatgatacaattcgaatttgtcttcagttcaaggtgcagacggtgttccatggagtcaaggaaaacgttcagatagatgcgatatccagggaatactattcgtcaattgtcagaatgtggtcgtcatgtccgtattgtagtagcctttggcaagatttctgttgcttgttgcttgttggttcgtttctcgatatgtggtgccaaaagatggtatgttataatgtggcatgcttgattttattgggtcggtgtgttgaattagagtacccaagtgtcatgaatggttcgcaagcagccccttggtacaacatgtaataggctaagtttggtacacaagtcccaatgacatggaggggtcttggtgaaaatgcgtgagaaattgttgccgttcaggtcaataggttgtatccgcggatacctaccacaatgtaccagggtggaccacaccacagagtactccccagtggggtcacgtggtagactcagcggacaatcccttggagaggtcctcataccagacacatgtgacactatggaggcatatcccatagtgtagaccattgtagtagaactagtgctgcatctgttgtacaatcctaggtaggagacctactgtgcatgtcctgcgtggagtaacaaggagttaaccaaggcctaaccttaacaggtctaaccctaacagaaacccaatggtctgatgcacatgattgggcaacaactatgttctgtgtgccatggtgttgtgcggtcctgtatgcttgctggctgtcttgttggtcatggtttgtaacctcttctcatacatcccttgataaggctacaatgtaaggtgtgtgtcaaatttgataactgtgcttggaccatctacagatacaacattgttctgtctttaactattctgcacacctctatatctacgttgtgcaatgtgtggcatcattctgcactgttctgcgcatttgcattgttgcacagtagcctggaacttccatggtggcctgtttttggcctgtgcacgccccattattcctggccccaatatggtgctgttatgtgtatttccattgccaacatccaatctcaccctgtgacacaagacctttggctttcctctgtgtaccactctggacttgcacctcaattatcatcaacagacttcaggtgatcccacatcatattactaggactctactttggtcaacaatggcccttcacctacttcacctacaactgattgaatcaatgtgcggcacacagatctttgcaagatatacagcacagcatattgcaagctctttcaggtcccacgttcactttctgcactgcatggacatatcgtataccccatggaaaatcttcagttatctgtcctaccctagcactgcctgcatgtttgacatcagagccaagtcaatctgttgcttgattagagttctacataacagttgatacagagcaatcgacatacttgtcaatccaccttgtatagtagagggatcaagtctaagtgtcctatttcatgttaccagtagaacaagtatggactcaagtcacaacaaaaaggacaagaatggagaggtagaacaatgacttcactcaattactgtcacaaatagctgtgattatcggtttttgtgctaaacaacacaccttcagccacgttgacagaattggcatgtatcaattgattgctatggatatcatacatcctagttataccacccaaggtcgactgagtcatagccaaatttacatgatttcaatcagtaggtgacaatatacactctgtgtgtacaatcacataagtgtttttcgctttgctagtgaccagaccatacttcaaacgatgctacaaccggcagagataagggtatatattggtataacatcttcatgatattcttcgagagaggtttccgtggctatcgttctatcgttccccaagcagacgggcgtccatcatcggttcgcaccgcagaggactatgacagcaaggaattaagcgaagatttccgagtatatgcgtggtaaaagatgtgcggcccctccatttcgctcactctcttagtgtacgtttgggcatctggggtttctgagggacaccggtcactcgaagcgatttgcaagggtctcgggagtctcccgcccgcgcgctacatcggaccggtacgccggtgttacaaatttaactcgctcgagctattctaagcttctggatcggcgaattttgatccgaaaaggttcggtacctttttgccgtgctgtttcaggacagttgctgccatatttgcaggatctaggccataccatgccggccaaccttgcgcttccgtaggctatgtctgtatcgctcaaccatgattggccgactcttgtcgtgctgcgggccttctccccgtggagacctcatctggataaaagcataaagacagcgagcaattgttccccgtactccccaggttggaaacacatctcgattattcaggtgctccaactatcattcaggcagcttcaacatgagtgcagagcaaactcaagagaagagggccgttgcccattttgaagctgaagagaagcttgatatccaaaatggatccgtccttgctcctacaacgactggcggaacgtctgccgagaagggctacgcaggatccataatcggtgacacgctcagagtagaatctcgaaagaccgagcgacaactgctgcgcaagcttggtgagcaggctttatgaaggtgtcttgcgctgaagctcactaagggacgtaacacagatatcgtcatcctgcccctggcctttctactgtacctctccgcctatttggatcggggtgagtaaagattgcgcgggcatcgtgtttcgacctctcaaggcgccccttcgatcttccaggcaatctgggaaattcccgcctcatgggcttgcagaaaaccgctttggatggaagtgacgaaaagtattccttagtgagcacgttcccgcgaatcatcatttcacgaagctcacgtcattcgtccggattatcaggccctctcatgtttctatatcacttatatcgtgttgagcatccctggaactctgctggcaaaagctgtggtaccttctacatcgatctctatcggcgccttgatctgggctgttgcagccactgctcaagcgggagttcaaaatccagctgggtgggtcaaatcctgctcattactatcatgcgcgcttcttcttaccgtcatactaagactgtaaatttgcatatccgatctagcgtgtacgtctgccgactcttcgtcggggtcggggaagcgatgttcggccaagccgtcggtgagcatagcatgagcggagatgttctgggagatgtgatcttgcttggctcatcccgcgcacgggacttatacagctctttacttctcctactggtataccaagtcagaaatctctaagcgtatcgccctcttcataggtgcaggagccttagctggagcgttcggcgggttgattgcctatggcgtcgctaggatcgagcatcccaagctggagccatggagagtactgttcttgatcgagggatgcccctctgtcttgctcgcgatctgcgtatttctcttcttgccaagcaggccccagactagcagatacctcacggagagtgaacgaactttggccatcacaaggcttaacgcagactccctgaacgaagggaatagcggaatcgactggtccggcgtcaagcgggctttcttggattggaagatttacgccattgccttggcttacagctgtatgaaccttaccctcgggtccgtctcaggtttccttccaactatcatcaagggtctcgggtataccgctgcccaagcgcaactcttcactgtgccgccatatgccgttgctttggtcttcacgatgatactgtcaacactttccgaccggttcagatcgagagggtaagcattgttatgctctcggcgatcggagccatatctgttcgtcgaatcttacctgcagaacagtctctttgcagcgggagtatacatcagcgggatcataggctgggcgatcctgttgacagttgatccggtccacgctagcaaatccgacctacacgttcgctactttggctgcattgcggtagtttgcgccggatacggcgcgatccctttaatcatctcctggcaatccaataacagcgggtctcagagtcagcgcgctgtcgcgcttggaatgttgaacacaattggtcagtgcttgaatcctgaaacaggagccagcatatacgtacaagagatattgactttgagcatgatcgaaacgtagggcaatgtctgggtatcttagcatcctattcattcccaagtcacgagggccctcgctacacgaaaggtatcattctgaatttagcctttcaagtcctgggatttgccatttgcattggcatgaccttgttctatcggtcagtggcgcttggcttggatggctcctatctagggcgtcacgacatttcgaatgttgactgacattctcgattctaggtgggaaaacaagcgccgtgacagggtggaaggcggccgaccaccagccggcacggtattgaacgtgatcgaagagcacgacctggcgttcggattccgctacattccttaggttgtttcgattgggaccatcgagaagttgctcgtagtgaaggagctggagatattaggtttttagcactttgacttgattctgtacaacacgaaggataattggcgcctgaaagattctatccaaatgacagtaggatgcgttctacacacaatccaagctagcctcgaagcccgatcgagctatttcaaagtcgaccaggtgcaaggcagctaggtcgacaggctccaagtcagtttttaacccactatgaatattctgcacaacccaccaggattgagcacttcatggactgtgccaacttgacggtttcttgaacggtgttgctccatccagacacattccatgcttgttcgcgggtcagctttctctctgcgaggttcggatactgccaggaaaaagctgtatcgtcaggactgcgtcgatcaacgcgcaaagcgccagggacttacctgccaaaggtgatgaacctcgtgcagcgttccaacttgagagaaccaaccgccggcaggttgctattgatgcaacgtgcataagaccaaagaaaagccaagtacagcggtaccaaaccgaacttttaatcgtactcaccacaaatctcttcctcgcttccaacccgcgcttccatgcgttctcccactctaggagtcgcccaggtatcaattgataactacgaagttcgtatacgcctccgtcctgacgaggaggcgatgaaggccagaaggcaaactctgacatcaattgcgaatgcctagactgcacagccggcaggatcttcttgttgaggatatccgggagcgtctatgcaacggcatgctcagtctcatcccgtctagagagaatgcaagagggaaagagcacaaggagggggctgtctgtgtcgtgcttaccgcgtgcttctgaagtctcaacatgacatcgtcatagccgtcgtaattctcgtactcaagtatgtgtactgaagcggccggtcgaaatccacaacggaaaaaaacaagacaacaaaaacagaccggaccattcgaacattagatggagcgatattcgactagtggtactgactgaaacagaacgtaccaaaattgtcaaccggtccgatcaatgtctcccagctccccgtcaacttcactttcaacgacgggtctttcgccagacctgcaaagtactgctcgctgcagtatagcaccataatagtagccgcagtctcagactacggattggttcagtacttgagctgatccaccggcttacgctgctgctctatactgatctctgcagtcgggcttgacggcatgagagatgagctcgtgtacgtacttgagtatcgtccggccgcacgtcagttaactgcatttacccaaagggccacaaagcgttaccttgttcctgcctatcaggcgagaatgctgatgtatttccgtctcgccttcggctttagctcgttcagatccatggagaaggctctaggatcggatgtgtatcaggagatcagatagcgatcaagtcgctgctcaacgatggccaagagacaccagatgacgcacagagaagatgcctccgggggacacggttgctccagattcagctttgccgttcaatgagatagagctactgccgatgtatctgcgaccaggctttaggagatgcccgccattgccggcaagcaaagtccgggatctcatgaattcgatggactgttgagcgactttgatgagctccgcctgacgaactcgacagatcggtcgtcactatgacttgtgttggaaagcgcaaggtgcaatatccaagatacttacatgtacggtatatatacgctatacaaggctcactggagcactggtcatctggtgatcccgtgaccagtctcctcgctcttccccgcatctctaattcgtggtgccccccctgaacctctaccgcgtccgggtgatgcgtcatcacgagttcctcagattggcgcgcggacaaaggccgaacaaagcctaccccaaacaaaggccggccggcccctccgtcggaaatctccagctagcgaatcttattcagttactaagataaggcacacatgccgcacacaacgcttcatggcatattgactatttgtagaaaccgatcgtagaggatgttgcttatctgtttgtctactgtctacagccctataaaacgacgatccctatactagctactagctactagatgatgtatgcaaactggaactgagctcatactgaacctcatgcatcattatggacaagatatcaccatcgccgggactactttgcgatcaagccgtcgtcgatcccgaccgcgtccgccttgcaaggctggacacgtagtgcaacgagcaggccaggagttccacgaatctatctacgacaaagaccgcgaaccgtgacagagtatactgcgagaccttgctgaatgcaactatcacccttcatcacaaggagacgacagtccattacacctacggataagaactgattcccctcgatctcacagttcccgaggttacgtacgctaacctttactactcagtcgctctcgctgtcactactatcggaagaactagagtcacttgttgcgttgtaggggggcaggttggatgagcgcgcatcgcgcctgacagatccatgcgcaattgacgggtgcagattcagccaaaaaaaaacgaaccgtacggacgtactgtagtgcgagaactgaccttccaggatttttcatatcactatcttgatcgcttgcttcggtggtatcgttacttgcatcactatctgtctcatcaaggaattcatcgagattcttgatttttctctcgcgctgactcgatgaagcattgggtttgaagggtggctgttgttgtaccgtgctagaaatggccgttacaggcgctttggctccttgtagctgctctgacgcaacagcatttgcatgggcaagcgtctcgggctgtcaacgagagaagtgacggtcattcggacggtcgatgaaatacagcagatcgagatgctctactaaagaactcacaatctccctaaatgagctatcagtcggctccgtcgtccaaggaggaacatcccagtccgtacctcgcatagctctattgtcgaagccagcgagagatgctatcggaaagttccgtcggattcgattggctgagagagatggcatcagcctgattgccctataggttagccgtgaagcaacgtactctgatctgatcgctgtgtgaggtcagcacaatccgacagcaccaacttgatttgctcaagccgcagcgtgactcctcccaggtcaagttcctctggttgagcgtcttgatctccaggctgtcgcacgctccgaagcaaccctgcaagcaatctcgcgcgatcccttacatcccagtcctgatcgtaacggcctaaattcagagcgtgtctcgccagcatgtgaatcgatcgtgagccaggacagtctgtcagaaggaccgctgctagattaaggatctcaatcttcgtcacgggtctctgtgttggatgggggtaatcagcgctggaaaggcatgtaacaaccttggtccagcttctcacctcgctagtgaagcatcgcacaccatctcgcagcagatcaggggcccattctgcgatcccttcaaattctgaaattgttgacccagtattggtgccgtctgtactgtatcgacttccaagccaatacacgctcgctcgagcctcttcgccgatgatgaatgatagcctgcggatcagact
